United States Patent Application Publication US 2025/0195589 A1 - sequence listing, part 4

SEQ ID NO: 7 - DNA, 2338256 bp, Lactobacillus crispatus
  source 1..2338256: mol_type = genomic DNA
ttgttcgacattaataaattttgggaacactttaatgacgagatgcgtgctcgtttcaacgaagttgcctacaatgcatggttcaaaaatactaaacctatttcatataatggaaaaacacatgaattaaaaattttagttcaaaatcctgtttctaaaggttactgggaaaagaatctatcttctcaattgattcaatctgcctacggttatgccgacatcgagatcttacctgtatttaaaatatctgaagatgcggatattacagaaaggatcgtaacacctgcgccaaagcgtgaagcgcaagttcaacagcctaatttgccagaaaaagaattcactaaagacttgaagttaaacgaaaaatacacttttgataacttcgttcaaggtgagggaaacaagttggccgccggtgctgcacttgctgtagccgacagtcctggtagtttttacaatcctttatttatttttggtggcgttggtttaggtaaaacacacctgatgcaagctgttgggcatcaaatgctagcagagcgacctaacgcaaaagttgtctatatacagagtgaaacttttgttaatgacttcattaattccatcaaaaataaaacgcaggacaaattccgcgaaaaatacagaacttgtgacctgcttttagttgatgatattcaattttttgcaaaaaaagaggggattcaagaggaattcttccatacttttgagacactttataacgatcaaaaacagatcgtaatgactagcgatcggttgcctacagaaatcccagatctatcagagcgtttagtttctcgatttacatggggcttgcaagtcgaaattacgcctcccgatttggaaaccagaatcgctattttgcgacgcaaagctgaaacagaaggttggactatcgatgatggtacgcttaactatattgcatctcaagttgatactaatattagagaacttgaaggggctttagttaaagttcaagcttatgccacaattgaaaaagcagatattgacgttaaccttgcgcgtgaagcattagttgacctcaaattagttcaaaaaaatcgtggattacaaatctctaaaatacaggaggttgtcgcaaactatttccaaacttcaactgctgaattaaagggtaaaaagcgtgtacggcagattgtagttcctcggcaaatagcaatgtatctttctcgtgaattaacagatgccagtttgccaaaaattggtcaagaatttgggggaaaagatcataccactgtcatgcatgcttatgataaaatcgacaagcagatgaaacttgattctgatatcaaaactgctgtctttgacctaaagcaaattttggagcactaaaagttatccactgtggaaaaataaacaagttttacacaagtttttaaccgtaacaagtccgttattttaggcttcttatgagttttcaacagaactcacaggccctactactactaattaattatataattactaataaagagaaatcacacagctattcttgggaggaaaaacatgaagtttacaattaatcgcaatctgtttatcgaaaacctcaataatgtaatgcgggccatctcatcaagagctactattccaattcttagtggaattaagttagacttaacagaagataaacttacgctaaccggtagtgatacagatatttcaattgaaattcaaattccagtcaatgatgatttaaatgtggaatctacaggttctattgttttaccagctagattctttagtgaaatcgtaaaaaaattgcctggtaaagacttctcatttgaagtaaaagaaagttttcaaactcagatcatatctgaaaatagtgaatttacaattaatggtttagatgctaataactatccacgtttaccagaaatttcagatgctgcttcattcactatttctggtaaaactttccgtgaaatcattaatgaaacgcaatttgctacttccaatgatcaaacacgagcaattttaactggggtacgtttcttctttagtccagataaaattaaagctgtcgcaactgattcccaccgtttatctcaaagaacaattgctttagaaaacggacctcaagctgaaactgatttgattattcctggtaaaagtttgcaggaattagctagaatcattggtgaagctgatccagaagttaaagtttgcccaggtgataaccaagctttatttgtaattggcaacttgtccttctattcacgtcttttggacggaaattatccagacactgatcgcttgattccgactgaaaagaccactagtgttgaatttgacatttccgaattatctagtgcccttgaacgtgccagtttgttaactcatgctggccgtaacaacgtggttactttgactttagatgtagaaaatcaatcagctaagttatcaggtaaatctgcggaaattggtaatgttgaagaagatgttagcttcagaaatcttgaaggaaacaatttagagatttccttcaaccctgactatatgcgtgatgcgttaagagcttcagtaacagattctgtaattatgagttttactaagccacttcgtccatttatcattaatccagataaagaagacattgaatttgtgcaattaattacgccagttagaacatattaatcaagtacacaatatttaggtcataaaaagtcgtcaaataaggcgactttttattttgcttttaaacgaaaacgcaaaatattggcgtatatttatttttttaccgtgctagtgtgattaggttattttgaaaaaaagctctgaaaaggcttataagagcgatttagtttgttatttgtgttgaaaactaatataattatataggtataaagcgtattgaaggtgagcattattaagtattttaaagttgacggcgatcatattactttggggcaattcctgaaggaagagagcattatttcatcaggtggacaagctaaatggtacttaaaagataatccagtaactttaaatggtgaacttgaagatcgaagaggcaaaaagatgcatgttggtgatcatatagtggttaatggccaagaatatgagtttcggtagggaagtcaatgtatcttgatcattttactgtacagaattttcgtaatttaaaaaagcttgacgtaaattttgattcaaacgtcaatatttttattggcaaaaatgctcagggcaagaccaatttgctagaggcaatctattttttagcattaacacgttcacataggaccaataatgataaagatttaattggtttcggcggtgagtttaccaatttacttgggcatgtacataaaagccaggtggatcttgatttacgtgttttgatcacccaaaaaggtaaaaaagtatggattaatcgagttgagcaggcgaagttgtctaaatacgtaggtcagctgaatgcgattttattttcaccggaagacctcgagttgatcaagggtgcaccagcactgcggcggagatttatggatcaagaatttggtcaaataaatgcagagtatttatacttcgcaagtaagtatcggcaagttttaattcaaaagaataattatctgaagcagctagctaaaggtaaggcaaaggatcaggtctttttagatgtactttcagatcaactagctggtatcgccgctgaagttgtctttcgacgatttaaatttcttaagtatcttagtcactatgctagcgatgcttatgcacatattagtttaggcagtgagcagctttcaattgcttatcatccatcagtggctgacatccaagctgatgacagtacagaagaaatttatcaaaagattttagcaagttatgcacgaaataaggcaagtgaaattcgcaaggggacaactacttctgggccgcaccgtgatgatattgaatttaaacttgatggtcaaaatgcacatctttatgcttcgcaagggcagcagcgttcaattgcacttagcgtcaagctggcggaaattcaattggtgcatcaactaacagatgagtatcctttactcttgctggatgatgtaatgagcgagttagatcatggtcgacaaagtgcgctacttaattatattcatgggaaaacgcaaacctttattactacgactgacttagaggggatttcctgggaaataattaaaaagccgcgtgtgtatcacattcaatcaggcaaaattagtttggagaaggagaattaaatggctgataattcaaaagaaaatcttgaaaaggtcaaaaaatatgaaaaagaggctgacaagtataatgccagtcaaattcaggttcttggcggtctagaagctgtacgtaagcggccaggtatgtatatcggttcgactagttctcagggattgcaccacttagtgtgggaaattattgataacagtattgatgaacgacttgctggttttgcgaccaagattgaagttacgactaacgaagatggtagtgtcaccgttcaagatgatggacgtgggattcctgtagatattcaagaaaaaacaggtcgtcctgcattagagactgtatttactgtacttcacgccggtggtaaattcggcggtggtggatataaggtttctggtggtttgcacggagttggggcttcagtagttaacgctctgtccactaaacttgatgttaccgtaatgcgtgatggcaaaaagtactttatcgatttcgatcatggccgtgttaaggatgagatgaaacaaattggcacggttccacttgatgaacatgggacgattgttcacttctatccagatccagatattttcacagaaactattgtttttgatgacaagatcttgaagaacagaatccgtgaattggcctttttgaacaagggattaactttaacctttactgacaagcgtaaagacactgccgaaacagatgtgtataagtttgaaggtgggattaaggaatacgttgcctttttgaacaagggacaagaagtattatttgatgatccaatttatgttgaaagcacctataatggcattgatgttgaagtggctttgcaatatacaaatggctataagactactttgatgacttttgccaataatattcacacctatgaaggtgggatgcacgaggccggttttaagactgcgttaacacgtgtggttaatgactatgcacataagtctaagatcttgaaagataaggacgataatctttccggtgaagacattcgtgaaggaatgacagctattgtctcagttaagcaccctagtccgcaatttgaaggtcagactaagaccaagttaggtaattcggatgctagaactgctgtagataaggctttttcagaaacctttagtcgtttcttgatggaaaatccttcagttgggcgcaagatcgtagaaaagggtcaattagccgaacgagctagaactgctgccaagcgtgcacgtgaagtaacaagaaagaaatctggtctggaaattgctaatttaccaggtaagttagccgacaatacaagtaacgatccaagtatttcagaactgtttatcgtcgagggtaactcagccggcggttctgctaagcaaggtagatcacgtttaacacaggctattttgccaatcagaggtaagattttaaatgttgaaaaagcttcgatggatcgaatcttggctaaccaagaaattagatctttattcacagctttaggaacaggctttggtgctgactttgacgtttcaaaagcacgttatcacaaattgattatcatgactgatgccgatgtcgatggtgcccacattagaaccttgctgttgaccttgttctataactatatgcgcccaatgatcgacaagggctatgtttatatcgccaagccacctctataccaagttcgtcaggggaaagtggtcagatatcttgatactgacgaagaattgcatgattacttaggtagcttgcaaccaagtcccaagcctactgtgcaacgttacaaggggttaggtgaaatggacccagagcagttgtgggaaactactatgaatccagaaaatagaagactggatcgggtaagtcctgagtatgctaaagatgctgacgcagtctttgagctcttaatgggaaatgaagtttcaccaagacgtgactttattcaaaagaatgctaaatatgttgaaaacttggatgcataggaggattagatggacgagaatcaaactcaagatcatagaattaaaaacgtcgatctaactagcatgatgcgtagttcatttttggattacgcaatgtcagttattgttgcacgtgctttacctgatgttcgtgatggcttaaagcctgtacaacgtcgtattctttacggtatgagcgagttgggggtaacgcctgataaaccatacaagaagagtgccagaattgttggggaagttatgggtaagtttcacccccatggtgattcctcaatctatcttgctatggcacacatggcacaagatttctcataccgttacatgttagtcgatggtcacggtaacttcggttctgtcgatggtgatgagccagccgcaatgcgttataccgaagcaagaatgagtaaaattgctgtggaaatgttgcgcgatatcaacaaaaacaccattgattggcaaagaaactatgatgataccgaaaatgaaccggttgtcttacctgctagaattcctaacttgcttgttaacggtgctaacgggattgccgttgggatgacaacaaatatcccgccacataacttgactgaagttattagtggtttgcacatgttaatgaaaaatcctgatgctacaaccaaggacttgatgaaagttatcccaggtcccgattttccaactggcggaattattatgggacgtggtggtatctaccgtgcttatgagagtggtaagggtaacattgttgttcgcgccaaaaccaatattgagactgaaaagagcggccgcgagcgcataattgtgagcgaaattccatttatggtaaacaaggctgaattggtgaagaaaattgctgatttggctcgagaaaagactatcgatggaattactggtgtgcgtgatgaatcagaccagacagggatgcggattaccattgatattcgccgtgatgctagtgctagcgttgttttgaataatttattcaagcaaactcaaatgcaggctaactttggtatgaatatggtggctattgttgatggtgcgccacactttttaaccttgaagcaaatgctgcaatattacttggatcaccaagaagatgttgtaactcgcagaacaagattcgagttagctaaggcagaggcaagagcccacatccttgaagggttaagaatcgctctggacaatattgatgaaattgtccacattatccgcaatagtcaatcaagtgacattgctaaagcaactttgattagccgctttggccttgatgataagcaatctcaggctatcttagacatgcgtttggttcgcttgactggcttggagcgcgataaggtagaagctgaatacaaggaattacaagctaaaattgctgactacaaagatattttgtctaagcctgagagaattgaccaaattatctatgacgaattgcttgatattcaaaaacgattcggtgataagcgaagaaccgaaattggtgctagcgaagtcgtttcaattgaagatgaagatttgattgaaaagcaaaatattctgttgacggttacccataacggctatattaagagaatgccaattcaggaatttaagactcaaaaccgtggtggtaaaggtatcaagggaatgggtgtacaagatggcgactttattgagcatttgatttactcaagtacgcacgatctgctcttgttctttactaatgctggtaaggtttactccaagaaagcctatgagattcctgaatacggccgcgcagctaaaggattgccagtagtcaacttattgcaattggaaaagggcgaaaaggtccaaactgtaattaatattccggaaggtgctgacgataattacttattctttgttactaagatgggaactgtaaagcgtacacacgttagcgaattttctaatattagaaacagtggtttaattgccttaactttgaaagatggcgatgaattaagcaatgttttgactactgatggtaagcaaaacatcttaatcgggactcacttgggctacgctgttaccttcaatgaaggcgatgttcgggcaatgggtcgaactgctgctggtgttcgcggaattaacttgcgtgagcatgactatgttgttggttcaggtattttaggtgctgatgaccaagtcttggtaatttctgaaaagggttatggtaaacggactccagcttcagaatatccagttaaaggccgtggcggtaaaggtattaagactgccaatattactgagaagaatggtccattagctggtgtaacaatcattaactcaaataatgatgtgatggtaattactactgacggaattatgattcggtttagaattgatgatgtttcgcaaactggccgtagcaccatgggtgttcgcttgattaaagttagcgatgatagtcaggttgcaagtttaaccgttgttccaactgaggaagaacaagatcaaactggtgacgatgacgactcaaaaaatggataattaattaaaaaaacaaaaaatttgaacttttaaaaaaattatcaaacttttttgcgtaataaataatgagcagtaaaaaatctgctaggatcacgtgaaaacagtttggtaattttttatttatatgctaaaattagaaattgcgagtaatattccattactccttgttcttgattttagcaagaaccatatagtccagaaggaggtgcaatagtcatggcaactacaaagtacgaagtaacttacatcatcaagccagatgttgacgaagacaacaagaaggcagttgtagaaaactacgacaaggttatcgctgataacggtggtactatggtagaatccaaagactggggcaagcgtcgtttcgcatatgaaattgataagtatcgtgaaggtacttaccacattatgactttcactgctgacaacgctgacgcagttaacgaatttagccgtttgtcaaagattgacaacgctatcttacgttcaatgaccgttaagttagataagtaattttaatttattatccgttatgtgatttaggaaaggaaggtacatgagtatgattaatagagttgtacttgttggccgtttaacacgtgatcctgaattacgtactactgggagtggaatctcggttgctacgtttactcttgctgttgaccgtcaatttacaaatagccaaggtgagagaggcgcagatttcgtcagctgtgtaatttggagaaagtcagcagaaaacttctgcaactttacttcaaagggttcattagttggaattgatggccgaattcaaaccagaagttatgataataaagatgggcaaagggtatatgtaaccgaagttgttgttgataacttcgcattgctcgaatcacgcaaggatcgtgaagcccgcggtcaaaatggtggttatacaccaaatagtggaaatgctggcagtcaacctgctaacaatttcccaaataatggcggatcacaaggtaattcacagactaataacaatcaaaataattcacaagatccatttagtggctcaggtgatacgattgatatttctgatgacgatctaccattttaaactaaattaaagaaaggattctagaacatggctcaacaaagaagaggcggccgtcgtcgtcgtaaggttgactacatcgcagctaaccacatcgactacgttgactacaaggatgtcgatctgttgaaacgttttatctcagaaagaggtaagattttaccacgtcgtgttactggcactagtgctaagaaccaacgtaaagtagctaatgcaattaagagagctcgtatcatgggcttgttaccattcgttgctgaagactaatttagatcgaaataaaccaaaaggacaggacacaaggttctgtccttttttcgtataataattaaaaaaattctctcttcgtattgtaccctaagtgtataattttttacggtaagttgaataaataattaaaaaagcccaagtcctttgaatttggacttgagctcaaacaaaaagaccagtagtctgatgttaagaacaaaaaacacattagaagctggtcttttatgaattcaattgtaactgaaatcgcaaatattataaagtctgaagataattatattaagcgtgaaagaaaaataatctgtttcttcttaaacctgattaaggaaatcatggccttggctttagctaaagttgatgatgaaatgattaccaaggttaaagcacagggatatcagattgataagaagaatgagcgctcaatcaatatggcttttggcgaagttaggtatgtcagaagaagatatgtctgcccaggcaaacaagcaaggtatcccttggatgaattaataggctttgacaaatacaagcgctacagtattttagcagtcaaaaacatcttagaagtaagcagcgttgccacttatcgcaatactgctctagcagtcaattgcctgtctggctttaatattagccatatgcaggtgggcaatttggtaaaaatggccgggaaaaatattaaagcgggccaagaagcagattcaagatatgatgccgcaggcactaagaaaaaggtcccagttttgtatcttgaaggcgatggcgtggtgatcaaaggcactaaaagccggttggaatttcatcgctatcaggtctgtgaaggcattgtcaatataagcaagaaacgcagaaagcgaatcaatgccaaggaatttgtttctttaagccgacttgatgcgctgaacgaagccaaggagtacctggccaatacttatgatctttctgatactgtaattcttagcaacgccgatggcggtgctggatatgtcaaaacagacttcgatgacattgtagggctatgcaagcgtcatgagcatttcttggatgtctttcacctaaataagaaaatcaaagaaaggctatattttgcgcctgacctgcaaggcaagctgatttctgctttggaatacaaatacagctatgacaaaactatcctaaccactgcagaaagccgactaattgatgaattgaataccgagctcaatcatgattatctggggcgcctaaagaattatattgatcgtcattgggacgatattaagccgtttaagaaacgaaaactgactgtgactaaagccattggctgctgcgagagcaaccaccgcaagtatacctaccgtgttaaggggcaaggcaagaaatggtcaaaatctggagcagaaggcatgcttaggatcttaagctgcatcaagaatcgagagctggaattttggcttagcagcgagtttgaagattcagaaataactgtattgactgaacaggaattaaaagcagcggcccgtgacagcttaaagaagcgtcatgaagttcatttaggcatccagcatggcgcattaaccgcacaggtagctggcaatagttatttaagcaagctaagcagaaatttaagtcatataaatatttaagaaattaaggttagactaatggtttaaaggctaccgcaaaaacattgacacttactattgtacctactgttttcaatcatgagccggaataaggtataattaacactgatatactatatctattaggaaggatcttcatgaaggattttttacgtaagctagaattgcctgaatttattaaggattcacggctgacagcttctataatcattgcactttctctttcattattgggaagcattattgcgatgattatgaatccattgtttggtttggcaatgcttttagtctttattttgaccgttgcctttgccatctatgggacctatattttagcgggtaatgcaaatagctttgcggttaatttgtcttaccggataaagcgtagtgaacaagaagcaatgattaagatgccgttgggaattttgctttatgattcggatcaccaaattcagtgggttaatccatatctgcaattatatttaaagagtacagatttagtggggcacacaattgaatcagttgaccctgatctgaataagctacttaatgaagcaattgaggcaaaaacagcagaaaatcatctggttgattgggatggtcaccgatttgaaatggtggtccaaaataatttaggcgtaatatatttattggatattacgcgctatgccaaaattgaagataaatataaagctgaacgattggcgattggtcaaattttcatcgataattatgatgagctaagtgaagcaatgcatgatcaagaattgaccagcatgagttcatatgtgcaaaatacattgagtgattatgcgaaaaagtttaacgcatatttaaaacggattgatgaagaccatttcttgatcttgatccatatgcaagaattagctgagatggagaaggacaaattctctgttttagataaggtgcgtcaagaaacgagtagaaacaatacgccacttactttatctatgggaattgcttttgggagtgattctttgtctgaaattgccaaccaggctcaatctaacttggattttgccctaggtcgaggtggagaccaggttgtcttacgtcaacccggtaaagacgcccgcttttatggcggtaagtctaatccgatggaaaagcggactagagttagagcaagaatggtttcacaagcaattagtgaactatttaaagatgccgatcaagtttttgttgttggtcatcagcgtcctgacatggattcagtcggtagtgggattggcgtagtaaaattagctcgtcttcacggagttaaagctaattttgttttagatactaataagacaaactatgatgttggtcgcttggtcaccttaatgcaacagaaaaatcaggataaggatatttttattaaccctgatgtagctttagctcaagttactgacaagtcaatgttggtaatggttgatcattcgaagtattcaattacttactcacgggcactttatgatcgtttgaagaatcgaatcatcgttattgatcaccatagacgaggcgaggaattccctgaaaatccaatgttaacctatgttgaaccatatgcttcttcggcttgtgaattggtcactgaaatgattgaatatcagcagccagctaacggtaagcgagttttgaccgatattgaagctacagcaatgttagctgggattgtggtcgactccaaggaattctcgttgagaacaggaactagaaccttcgatgcggctagctacttacgttcaatcggggctgactcagcagttgtaagcatgctcttgaaagaggatattgatagtttcctcgaacggacgcatttagtagccactttgaagatggtgaagccacatatggccgtattatgtggacctgatgataagattatagatccgatcattacagcgcaggcggctgatactgcacttgatttgggaaatgtgggtgctagtttcgcaattacgcggcgcagtgataatacgattggtatttcagctagatcaatgggtaagatcaacgttcaaattattatggaaaaattgggcggtggtggacatctttctaatgcggcaacacagattaaagatgttactattgaagaagcaaaacaaaaattacttgatgcaattgatgaatatgaaaaagaaaatgattagggaggacaaatatgaaagttatttttactcaagatgttagaggtcgaggtaagcgtggacaagttaaggacgtacctgatggctacgcacaaaattacttgattaagcgaggcttggctaaagaagctactaaaggtaacatgaataccttgaagcgtgtagaagctaatgaaaaggctgcttatgaagcagaaaaggccgaagcagaaaagatcaaggcagaacttgaaaaagacgataccgttgttaacttcaaatctaaggctggtactgactcacgtttgtttggttcaatctcaagtaagaagattgtggaaggccttgaaaagcaatacggtatcaaggttgataaacgcaagcttaacttgccagaaccaattaagactttgggctatactaatgttcatgccaaattatttaagggtgttgaagctactattcgcgttcacgttactgaacaagactaataaaaagtggttgtgattgatggataatatcgtttctcaacaaattccgcatgatcgcgatgccgaaagggcagttctgggtgcgatttttatcgatcctgaagcaattgcggatgctagtgcggtagttcagcctgaagatttctatgagcgggctaatcaaattgtctttcaagcgatgttggacttgtctgatcgcggggatgcaattgatacgctgaccttacaggatgaattaaataaaagaaatcagttagaagatattggtggtatcggttatgtttctgaattagcgatggccacaccgacagcagcgcatgttacctattatgccaaaattgtgcataggaaggcgctgcttcgtcgtttaatctctgctagtcagaagattatctctaatgcaatcgatggctctgacgatgtaacagacattctagatgacgctgaaagtgaaattatgaatgtttcgtcagagaatagcacaggcggctttaggaccattaaagagatcgttaattcagcgattaatgatattaataatattccggatgacggaaatatggttactggcttgccgactggttttgcggaattagataagatgacaactggttttcacgatgatgaattgatcattgtagctgctcgtcctggtgtgggtaagacttcatttgccttaaatattgcgcaaaatgtagggctacacactgaaaaaagtgtagctatgttctcactagaaatgagtggagagcaactggttcagaggatgttagcttctgaaggactgattaattcacagcacttgagaactggccagcttgatgaagaagaatggcgtaaattggtagtggcttctgggtcactagcaggtgcgcaaatctttatcgatgatacgcccggaatcaagatgagtgaaattcgtgctaaatcacggcgattagctaaggaaaagggcaatcttggtcttattgtaattgactacttgcagttgattgagggaccacgtagtgagtcacggcaacaagaagtttcagctatttcacgacaattaaaaaagctagctaaggagcttcatgtgcccgtcattgccctttcgcagctatcacggtcagttgagcagagacaggataaacggcctgtactgtccgatattcgtgaatctggatcaattgaacaagatgccgacattgtttctttcttatatcgggatgattattatcgcgatgagcctaaagatggcgaaagtagtggcagtcaagatgaagttggcgcagaagacgataacggtgaagtagaagtcattattgaaaagaaccgttctggtagtcgggggacagttaaattaatgttctctaagccgtttaaccggttttcaaatttggattatgcacatgatcctaatggcaattaagattaatcaagtgtctgggaaaaaactaagtctcagatcatgaaaaaagaacgttgaatttttgtttcaacgctctttttgtatacttttagctccagccttgatattattaaatcatcacaaaataaaaacaaaaaggtggaaactaacatgtacaagaattatatcacaggtcaaactgctttaacacttaatctagattttgccattccggccaatcatttggctaatgtcatcagctggtttgtagattcaattccagaagatgttttagtaggcaagactgctaaaacgggccgcccagcctatcatccagccatgatgctcaaaatactgctttttgcttactccagaagagttttttctggcagaaagattgagttgatgctggaagaaaatctgccaatgatgatcttggctgaccagcaaaagatttcatatcatactatcaataattttagatcaagcagccatgccaatgaactgattaaaaagagctttatctacttcactaacctgttagaagatgaaggcttaatcaatgaaggtgctgcttttatcgatggtactaagattgaagctgatgctaaccgctatacatttgtctggcgcaaagcggttgaaaagtatcatgaaaagctgaaaggccaggcagttgaactttatgatgaattgattactaaagaagtagtcaaagaaatggaaaaagaaaaagttcaaactagtcaggggctaaaggaattagctcaagaaactgaagcagaaattaacaagctgactaaagagattgagcaggaaaacaaagccattcctggcggttcacctcgaaaagccaagcgacgtggactaaaaaagattctgcaccggctaagaaaagattatgtgccaagaatgcaaaaatatgaagaagccgaagagatctttgccggacgcaacagttattccaaaacagatcatgacgccacctttatgcatatgaaggaagaccacatgaaaaatggtcaattaaagcctggctacaatattcaagcagtcacgaccgatcaatatgtagttgattatgccatctttcctaatccgacagatttcaaaactttggagccggttttggatcaaatgaccgtgttggacaagtttgacaaaatcgtcgccgatgctggctatggcagtgaatacaattattcgatgctggaggaaaaatatccagacaagaagtactttattccctacactatgtatgaaaaagaacagaccaaaaagtataagaatgatccaactaagctaatcaactggtactacaatgaaaaagatgattattacattgatcatcatggcgtcagattcaatttcaaatattacagccagcgtaaggatcgttctactggtcaggtccgtgattttaaggtttatgaggcagacgagttccagctaacgccagaattggaacaattggctaaaacagctagcggccgccagcgccaagttcgctataatcctaactggcaatatttaaaagaaaaagcaaaagaagttctccaaagcgaagaaggcagacacatctatggcatgagaaaatatgatgtagagccagttttcggacatttgaagaacgtatttggcatgcgcagaacgcacctgcgaggtaaagagaaggtcgaaaccgatatcggaattgcctttatgatgatgaatttgaacaaatattgtcaaagaaggtggctgaagggccgatttttattgttaaaaattttaaagagaacaaaaaaacgatcaagattcttaaaaaaggaaatcttgatcgtttttattcatctggaagctagttttttcccagacacttttttgtacttaaataaaacacaaacaatatttgcatagtattgtactataatttatattttatacgcgtggtgctagttaaatctttctagacaataagccaaattataagctaaaattgcaatttccaaccggctttgaaagcctatcagactacgtgctcgattgttctcggcattgtaataggtcagaagcgaaaagtcgctttcaattgttctgcgaatagccatcaattgatgatcattgtgctttttagctcctgtcatatttttacgatatggtgtccaaagttcataacccatttgttttagctgttgatgcagttctttgcctaaatagccttcgtcgccaagaagatagtaattagatggatgggcattttccagcagttcaactgtctccttggcatcatgaactgatgcttttgttacgacataatcaagaatgtaaccgtcatcgctaacaatggcatgaactttgaaaccatagaagtaaattttcttggtggccttataaccaatgttggcataaccgcgaaaaattttagcacgatagttgcgaattggttggcaaacaggtaccggaaagctgtcaatgatcaagaaatgtccattcaggtcaacctttttattcatttcttgccgtatctgataaatcaattgcaatagctgacgtgaacgccgattaaaacgtgagtgtgataaacaattgaaacattcacagaatcttctttgtgattcaattcctgtcttagcttgccagataagtaaagccaaaatcagactgtccgtagttttaatttgatcaatatttcgccgatgagtaaactcagccggtgcatacaaacgataccagtgccgacaaattatcactaaatctttaaaactaacttgtaaatggtggctaaaacgcttaagcttaagacagttcaatcagatcagactcttttctattattactatttacaagtcgagtctaacaagattggacttttttattaactaaaacgatttaactagcaccatgcgtatattttatattgaaagtacacttaatatttgttataactaatattgaaaagatcaaattacgaatatactactcatggaggaatagcgagtttatgaagtttaagaaaattttgcttggtgcgtgtgcagttttagcagtcgtttcactagctgcctgctcaaatagtaagaagagttcatcctcatcgaatgaacctaaggaattgaacgttgaatttgtaccaagtacccaagcaaataagatggaagctaaggccaagcctttaggcacattattgcaaaagcaattacacattccagttcacgtaaccgtttctaccgactatagtgggctggttgaagcaatgtcatctaagaaagttgacgtaggctttatgccaccatattcttacatattagctcataaaaagggaattgctgatgttttattgcaagccgaacgttacggctatgatgaaccatccggtaagatgaatcataccttaatgcataagtatcgtggtatgatcgtggttaagaagggctcaaagatcaaatcttggaaagacttaaagggtaaaaagattgcgattggcgatcctagttcttcatcgggctatgtttatccagttgcggaactttacaaaaagggtttgaatgtaaccaaggactgcaaattagttaatgttaagggtgacgatcaagaagtgttatccgttttgaatggggatgttgatgccgcattcgtcttctcagatgcacgtaatattgccgctaaggatgacaagaaagcaatgaccgatgttgtgccaatctactttaccaagtggattccaaacgatactattgcggttagaaaagatatgcctaaaaaattcagagttaaattagctaaggctttcaagaatattgctaagtctaagaagggtaagcaaattatcgaaagcatttataaccattatggttacgttgaagctaaggattccgactttgatggcttacgtcaataccaaaagattgtgaacaaggctaccggtggtaataattaagattaaaaaagcactcactaagtgctttttttgtattcatgctaagatcagttaaaataaataaaacactaaaagcaaaaatgaaaagagaagaaaaaatatgaaaattgctgttttaactgatagctcagcttatttaactaaagaacaacaagaaaaatatcaaatcgatgttttgccaattccaattatttggggcaaaaaagtatatcatgacttagtcgatattggttatgaagaattttatcaaaaactaaatacagcaaaagagctgccaactacttcgcagccttcaatcggtgatcttaagcagaagattgatgaatacgtggcagcaggctacacggatgttattgtaattactctttcaagtgggatttctagctatttctcaaccgttcagagtgttgcggcagaagaagaccgaatcaaggttcatccattcgatagtaaaattacctgtgctggtgaggcggattatgctatgttggcaggccgtttaatcgaggctggagcggatattgatttgatcatgcatgatcttaaggacctgcaaaaaacgatggatgtgcgctttatggtggacgatttgagccatttgaagcgtacaggtcgtttgtctaatgcggcaagttttgttgggacgctgtttaagattaagccgattttatcgatggatgtgcaaaatgaaggccatatttcagcgattgcgaaagagcgtcaatataaacgtgcatacaagcatgtgcaaaatgattttgataatttgactaaaaatatgccgtataagattcaggacacaatttttgattcacttgatcctgagaaaaaacaggcctggcttgatgattaccgagctaagttccctaagtataagtttgatactagtattatcggccctgttgttggggtgcatgtaggtcaaggtacaatgtcgatgatctggtgccgtgatttggatacttattttgatgaaaatggtcagccaatcaagggaattgagtcacaagcagtagtggatccagagtaagcataataccgatatggcaaaaaaatgagaggcactattgattctttaatatcattgctatattattattaataatttaatatggcgatgaatagggatgatcagagtgtcaatcagttctttttttaaaaagttaatagccaaaaataaactcttgtttttagctatggtgattactagtgcttttgcttctttagatggcgtcatttctccttatgttattgggaaaattactaatacactttctcagaaacattttagtgagataccgaaaatcttgttactgtatctgttgatgatgctttttctgaatgttagcttttatctatggcaattttgttggggaaaaattaccaaatcaagtaatgaattattgagatctacagcttttaataattttattgcttcccctagtgaaaagaaaatcactaataccctgaattttatcaatgttaatgttaaacaaattgaaaatcaatgtattgattcaacaattatgcttgtttactgcgttgagcaagccatcgtttcattagtttatattttaagtattaatggcattgcagcaatggttttcttagtttgtgggttaattccatcagttattccacgtttaactcgtaattgggttcagacaggaactaaaaagtggaatagcagttatgaaaactataatcaaaaaacaagtgatgctgtgtatggttttgatactatcagacatgcaaatggtgataatagattcaaaatatttgtccaaaaagcattaatgggagaagaaaagaagtattttttgatgaattttcggcgtaatacttctaattttttagcccaggtctcttattcattatcaatggttatttctttggctgttggtacattctttgtaattaatggtcaaattctagtaggtggtttgatttctctatttttagcatcagatcgtttaactagtccaattatttcgattgttaatattgcaaatcaattgacctctgttagtcctctgctaaaaaataaagctttacaaaaatctaaaaagcaagaatttaataatttagacttcaccaaattaccaaaccaagagaaaataatttttgatcactgcaatttagggtattctaataaagctattttgaagaatattaatttgacagtttctaaaggcaataaagtattgatcatcggtcgttctggtattggtaaatccactctgttcaagacattgcttaatgaaattccattgctaaagggcaaaatactggtagataatagtcttaaccaagctaatttctataccaattttggtattgttagtcaggatacttatatattcgctgaatctttgcgctttaatttaacgcttggaaaagattttcctactcagcaagtaataaatgttttggaaactgttaaattaagttatttagctaatgaaaaaagcttagacatgcagatcggggagaagggattatcactttcgggtggagaaaaacgaaaactggaaattgcacgagctttattgaatcaaaaatcgattttacttgttgacgaaggactatctggacttgatgaagaaagcaataaacaaatttttgcacttcttcaaagtcttccgcagacagtaattgaaattgaacatgctgttagtccagaagagaaaaatcaatttgatcaaattattgatctaggagctcagtattgatttttttataaataaacaaaaacaattacatacgtatgaaagcctttacacataaagacttttttatttataatattagcagcacgaaaactttttggagaaaaacttacatacagaaaaggatgagaatatggcagaaaagaaatatgtcggcagtatcgaagcaggcggtactaaatttatcgtagctgtgcaagatgttgaaacaggtaaggaagtagcgcgtgatcgtattcctaccactactaacaaggagactttacaaaagactgctgaatttttcaaaaagcaccccgttgatgcattaggaattggtacttttggtccaattgatatcaatcctaactctcggacttatggttacattttggacacgcctaagccaggttggtcaggtacagatgtgaagggcttctttgaaagaaaattaggtattccagttgccatgacgactgacgttaacgcatcatgttatggtgaatatgttgctcgcggtcgcgatgattctaagagctacttctatgcaacagttggtactggcgttggagctggaattgtgcaagcgggtaagttgctcggtttgaataaccacccagaaatggggcacatgttggttcgtcgttatcctggtgatgattatgaaggccattgcccattccataatgatgcttgtgttgaaggcatgtctgctggtccaagtcttgagggcagaactggtatccctggtgaaaaattgtctcgcgataacaaggtcttcacttattctgcgtattacattgctcaaatgctcttcaatgtttacatggctgctcgtccagatgtaatgattgttggcggttcagttttaaatgaagatgatttggttaaggtaagaaagttctttgatgaatttaacaacaattacgttgccacacccgatttgaatgaattaattgtgcgtcctgctgtggctcacaacgggtctgcaactcttggcgattttgaattagctaagaatttgctcaaataaaaaagcatagataaattgaataagcaataaaaaggctcaactcgttaagaaagacgtaaggcgagccttttttgacgtaatttgacctaaatgcgcgtaatattaattctagaaacgtaaccggtttattaagaaaggagcccaactatgaacaaatcagatagtggcttaaaagacaaagttatcggtaaagtgaaagaagtcgaaggtaaaattaccggcgataaatcacgcgaagtccaaggaaaagctcaacaagccaagggcaaagttaaggacaaagccaaaaaattaaaggatgatctggaaaaagaccatcaaatagatgaagattgttaaagactcaggtcgactagcaatagctaaacagaaagcaaataggtgatcctatgttatcatggatctgggttttaatcgttggcgctataataggtctaatagctggtttcataaccggcaagggtggatcaatgggatttctagctaatttaatagcagggctggttggttcaaccttaggccaagcaatctttggttcgtgggggccgcaaatggctgggatggcaatcgtaccatcaatattgggagccgtcatcttggtactagtggtttcctttgtactagggatgcttagaaaaactgaataaaaatagaataagagaagtgtctgggaaaaaactaacccttagatactgaaagacgatcaatccaactcttaatttgagttgcttgaccgtctttttctgtctatttttatttttgaacaaagaaaattggtcttttgaccatcttctgttccaatatttgcttaaattcatcatcatgaaggctattcctatatctgtttcaaccttctttttgcctcttaaatgagttcggcgcatgccaaagacgttcttcaaatgtccaaaaatcggctccacatcatatttcctcatgctgtagatgtgtctgccttcaggactttggagaactgctttggctttttcttttaggtattgccagttaggattatagcgaacctgacgttggcgtccgctcttagtcttggctaagcgttctaattctggcgttagttgaaattcatctgcttcatagaccttaaaatcacgaacctgaccagtcgatcgatctttacgttgactataatatttgaagttgaatctgacgccattttgatcaaggtaataatcatctttttcatcatagaaccagttagccagcttagtcggatcgttgcgatgctttctggtcttttccttttcgtacatggtataaggaatatagtacttcttgtctgaatactcttcttctaacattgaataattatattcgctgccataaccagcatcagcgacaatcttgtcaaacttgtctagtgtcgtcatctgctttaaaaatggttcgaaagttctgaaatcagttggattagggtataaagcaaagtcaaccacatattgatcagtggtggcagcttgaatattgtagcctggcttgagctggccgttcttcatgtgatcttccttcatatgcatgaaagtcgcgtcatgatctgtcttagaatagctgttacgccctgcaaagatttctttcgcctcttcatatttcttcattcgaggaacatagtcttttcttagtttatgaagcagctttttaagaccgcgtcttcttgcttttctaggcgaaccgccagggattgctttgggttcttgctcaatttcttcggtcagcttttcaatctcggcttccgtttcttgtgctagctctgccaaaccttgactggtctggactttctcttttgccattgctttgacgacttctttggcaatcaattcatcataaagctcaaccgcttgacctttgagcttgtcatgaaatttttcaactgccttgcgccaaacaaaagtatagcgattggcgtcagcttcgattttagtgccatcaataaagatcgctccttcattgataaggccctcggcttctaacaaattggtaaagtagaggaagcttttcttaaccagctcattggcatgcttgctggatctaaagttattgatagtatggtaagaaatctgttggtgttcagccaaagccatcatcggcacgttttcttccagcattaattcgatttttctgcctgaaaatactcttctggaataagcaaaaagcaagattttaagcatcatcgctggatgataagctggacgaccggttttagcagtattacccaataagacatcttctggaattgaatcgacaaaccagctaatggtattagccaaatgattatgaggaatagcgaagtctaagttgagtgttaaagctgtttgacctatggtataattttgatacattaagattgccttctttctttttgttttgtggtgattcaataatatcaaggaaggcacttaaagtatagaaaaagaacgatgaaatccattaggaaatcatcgttcttttttcctgtctgagaattagttttttcccagacactttgtgtttcatgtgaaactattttagcttttttcgttcattttctttctcagctaaaaaacgttgcttaatttcttcaggcaaaagactagggaccgtcttgtcataaaattcaaagaatatgggtgccttgttagagtcattgctcttgggatataaggcaaagtcactttcgctaaacggtaagctgatattaccacgtaaagcattgataatctcaccgaacatatgcaaaacataacggcgcgtctcaggctctaatgacatgattacgcgactgaaacggacagtgcctaataatttatgggcagtaatttgaaaaatatcggtaatatttaattcatcaaatgcttggaaaagagcatcccataattcaccacgttgcttttcagggatgctgtggttaaagtcgatgaagaaatgccgcaaagaacgtgcacctgaagtaagtccttctgctagaacaaaactatcacggccaacagaccaacggcgtggatcatgttgctggaccatcggtgcagtgcttttgacgattaaaacgtgttcaggatgatcaagcatggtgccaatgattgaagcttctgggaggtaggtcttcatcttgggtaatgcacgtacaaagccaggtgctttccagacttggtggaaaaagccggggccgtcaaagctaaaggccttgataatacggtcctgcaaatcaggctcagcgacacttaaagcatattcagcgtaattgccacctttagagtgacctgctaaatatattttgtcgtgaggaaattccgcagcaatttcttttaaataatgagcagcaacatcttgcccatagactttaggcatgtagttcatgttcatatcttcgttccagccaattaatgaactgtcagtgccacgatagacaataataattttattgtcagttagtcgaaaagtagcagcggtgaattgcaaaggatatgggtctttttctaggcgattagtccagttaagaatcttaactttgcccaagcgaggtgatttgggcaaaagcagaacttgatcaccagctaaatctttcatttgtacctgaaatgaaggtagtactcgcagtttttcagctacttcgcttagggtgtgtcctttggcagatttgtcgacgggcagataaataatggaggcgaagagagagacatccacactattgaaaggacgctctttaaaagaaagatctccacgccaacgtaaatattcaagtgttccggccataatctcgtcctttctttcacttttagcaataatactattctactagattattgtggcaaaataaaaaatctcaggcgaatgcttgagatctaaacagaattttaaataccaccacgcgtatagctgatgcgcgtaatatctggatacttacgtaagttcatgataattgaattttcgtcaagtttattattgataaccccatcaatgtagaaaactatccgatcatcacttacgtctaaaattttgatagtaatattttcaactttattttctgcaagttcatgtttaattttagacaaaatgtggtgctggttaatagccacaatttgaatgttaaaacgaacatgtggcgttattttgttgataatgacatcatcgtgaaagatcatttgaatgataaacaatagggcggttgataggataccgatgaaatacatgccagcaccaacagccatcccaatggcggcagttgcccaaactccagcggcagtagttaagcctgagacctgttcttttctaactaggattgtacccgcaccaatgaaggaaattcctgtaacgatctgggccgcaattcttgatggatctagtgcaatgtcatgcatgcttaatagatcggtaaatccatatttagatacgatcatgaataaagcagaagcaatcgcaactacgatatgagttctcacacccgcgctttttctctgaatcgcccgctcatagccgattaatgcgccacaaaaagctgcgacaacaattctaagtagccaatctaattcggttgtaattggagctaaagtttgcattatttagtcctcatcctttgtataatcaacaattattatcatttctattttaacgtaaatgcagaaaaattatagtctggggaatttttttgaacttttttcaaaaaagacttgcacagctctcgtctatgtggtttaattaatactgttgtcgggtgagacaacgaagagttgctgacttagctcagttggcagagcacctcactagtaatgaggaggtcggaggttcgaaccctctagtcagcattagttaaacaatttaatagtttttaagtctatcaattaagttcgaaagagcttgatatgataggcttttttgttgtttctagatatttgtgtagatttaaaaatagttatgaatatttagtttcaccacaaaaattgccacacagtttttctagtgtggcatctgtgtggcaaaggttcgattaatgttgtagtggcgggctttattgcttgccatttttttcgttttcaaagtatccatgatttaagaatgactgtcgatactcttttaagatttttatttgatggtctatggcaggaactaacgtatatgcattatttttattgtagaattcatccattaatttagtattcgattccttgtagtccttaatgaaattactatcattttgattcataataatttcttctaactgcatacgaataactaaattaacattattaatcatttcaagatcattggcaccttccaatgattcttcaaattttttatcaaataaaaatttgaatttatctttccaaaaatttattacgtatgatttctttttataatcttcatcatttttagtaaaagaatcagcggtatctttatctccatttatagaaagaaagtgagaaatattatttttcatattactcaattcttcattattatcataatatgctgaaaaaagtaaattaattaacttactctctacttcttcacctctaattccttcgccttttacataagatactggaactttaaatatttctgctaaagctttccatacctcttcatttggaattctgcttcctgcttcgtatcttgctattgttactcgtgtagctgatatgtttttgttctttaaaagattagatagatcttgttgtgtaaaataatttttttctcttagttctttaattcgatttggagtcatattattacctcactaagattaattttatacgattggtacataattagcaaaagtaccaattttggatacaaaagtgttgactacaagaatgaataattgtatattatatgtaaccaaatgtggtacacaaaattataaataaccatttttggaaacaaaaaagaaagagggaatattaaaaatgtccagtaatgtaacaaagcaaggtgaagtactatctaccttcaacgaaagtagtagtaaaagaaccccaattcaatcagcattaacaagaccgttggttgaagcaattggtaagtgttttctattgttgagcggaaccacagaagaagttcaagatcctaatgatgagtctaaaactattccgcgcgcagtatacgaagtaagagttattagctctaaaactagattacctattggaactgtgctaacggtgaaaattaaaggaggtaagagtgtaattactgatgaagagaataagaagttactgttaggcttagagaaaaataaggtagtagcattcgacgatctaagtcattggaactttaacggaaatgagggattatcagcttcaggtatgcgagtattagaagtcagtccgcaagaggctatgaatttatagaaatgaggcggcttatatgaaaataaaaaaattagtcttagataccaaaaacccgttaggcaatcctaacggggtaaaaatggcattaggagtaactttattatcttcaattggtcttgagtataaagttgcacctcaattcataaatgctggtaattataccgcattagcttatccatttttaattaatattatacctctagggtatccatgctggaaatgggttaatctccatatcgttaattataagatctataagcaattgatgaatattgttcattcggaacaattaatagactatggagataaaaaagaaactaccactttcggtgaaagaaaagttgaatatggtgtcaagatcgtctatgaagaaacggcagaaggtacatatattactgtatatcctaatggtataaaacatagcgacgccactcagacgctaaacaataggctagaggaaactttcaacatgaatgttttatcggtagatcatcagctagcttatacgaaatatttattgagaaatgtaaacagacaaagaatggaggtttctaatgataacttctaatttcgtaataaatcttgataagaatacatcattcagttttaaaggtagtggtgggattcttgtcactgggagaagtggctcaggcaagactaataccaccacatatataatgctgaaggcgatgtcccaatgtgattgcggtttatatattattgatgcaaaaagagctgatatgtatggacttcatcaatttttaaaagatggcaagaaggtagtggcaagtacaacaaatcaaatagcacgattgttgcgtgttcttaatgagaacatgagcgcacggtatgagcattttaagaatggaaaatggggacaggatttcgctgaatatggatatagaccatatttattagtcattgatgaagtatctgcgatgttggctggggctggtaagaataagaaagaaataatgggtgaattgcgtcaagttatccttcgtggacgacaagcagggatatttacccttatttcagggcagagaattgatgcaactattttagatcgtgatattaccttacagttaggtacaagaatcgtgatgggacaagcagattcggagacttatcgcatggcttacccaatggtaaatgatattaaagcattaccattagtacctaataagccggggtatggtcttatctattcagatgggcaaaaaattagcaatcctactccatttgtctcaccggatatgtctaacattgatgttccaggggtaattacgaggttagagaataattttgatccatctaaatatattgatgaatcaagctattgggaggtttagtaattgataagttgccagctggcgggcgacagagtcgcacgaatggaatgtccaagcgtgagcgggctggcaacacccaactaataatatgggtgtaacggaaagattattaatcatggaaacgatgaataatattaaaattgatcaacttcgtctaaatattccatatgatgaaatctatcaagtagaaaatagtcaaagtttacccaaagaagttatagtagctgataatctgctgcatctggcatggttgtttaagtctaatacagtgagtcatggacataatggctatacttcttcatataatttcggttcaggagaacaaggcggaaatatttccgtaatgtggaacgagtcaagaaaagatatgggaatactagtcgactttactgcgacaggcaaagcgctatatgaaagccttgctgaattacatggaattcctgttaattggaagaaaataattgaagaattatatgaaaaaatggggcatatatcgaggctagatatagctactgaccttattaattatggtttttcagttaacgaaattattcaaaggttaaagaatgaagaatcatttttcttgaatactcaaggaaataaaatcaatgctaatcgatttaagataattggaagctatagtgaagctcagactctatatatcggtagtagaaaaagtgatgcttttctgagaatttatgataaaaaagttgaacaggatcgagccgatggactctatagaaacttggctagaaactgtaacgattggataagagtagaagcagaatttaaacaccgtttagctaaagaactaggaaaatatattacaacattaactgcagataatatttatccttatttacttggctgtgtactagaacgttggtcattagttgatagggaagaataatgacatatgaaaaattccaatattctaaagaatggaagattttaaaagagttatcgaaaggacaaggacttcaagaactaaaacaagctcaagttgacgcttccctgaatagaaaaattaattggttcttgtatggtggtgccagtggagttattacgttgattaaagaaatttatggtgatgaagcactaaaaaagttttatcaatttttagattattttatttctaatcctgatacgttaggacattactaccactcggacaagataaaggcggatactaaaactattgcagattctacgcaaggcttgaactttggagaatatttagaagacttaaagagagaattagttgagggagataaacagaaaggcaggggctaatatgtttggcacagagttactcaacgctagacaaatagcagaagaattaggtattagctatacttacttttttaaattaattaaaaatgggtgtccttatcatcaacttggagaccaaggacgtaaatattacgttttaaaggaagtacaagagtggctattagtaagtagccaacattaattagaagacgtagcaacttgctacgcttttttaggagaaagctatgtcaattacacaaattaaaacggggaaaaataaaggaaaataccgtgttagaattcaacctactgataatgaaacaggtaaaactattccgattcctagtaaagtaacaaaaactagcagtaagcgtgaagcaaaacaattagaagaacaaatgtgggtgcaatatcgcgcgcataaagaaatgaatttaaatgtattagatcaaccacttgcaaaagctttagatcactatgtagaagaagaaagaagttcggggcgttggtcatcgattactacgtatgataattggaaatatacggttaagcttgtttctcaatatttcggaaagaaaaaagttaaagatatcaaagaaaaagatatgcgtagttttgctagaaattacataagtacacgcgtggtgctagttaaatcgttttagttaataaaaaagtccaatcggattagactcaagttgtaagtaaattaaatagaaaagagtctgatctaattgaactacctcaagcttaatcgtttctctcaccatttacaagttagttttagtcgtttaaatgtaatttgtcgttcactatataatctttatgcgcctgataagcttacgcatcgaaaaaacattgatcaaacaaagctttccgacagctccatcttagcgatgctcatttggcaaactgaaattggaattgaatcccaaagaagattctgtaaattttttgttggcttatctcattctcgctttaatcgtcgagccaagatgcttttgcctttaattcgctgcatccgtcaagcttggaatcaagaggtaaaggttgctggagaatttttaattattgacagttttcctgttccagtttgtcagcctgttcgtaattatcgtgttaagatcttccgtgacatagccgatattggctataaagcaaccaagaaagtctattattatggtttcaaggtgcacgcgctagtaagcgatgatggctatttgcttgactacgcagtcactaaagcatcagtgcatgatgccaaagaaacagtagaattgatgattaatgctcatccaattaaccattatcttttaggcgatgaaggctacttaggaaaagacttagctgccgagttaaaaggtatgggctatgtcctttggacaccatatcgaaaaaacatgaaaggtgctaaaaaacataataatcatcaactgatggcaattagaagaacaattgaaagcgacttttctttgctcagttactataacgctgaaaataaccgagcaaggagcttagctggctttcagcagcggctagaaatagccattttagcttataatatggcatattgcctagaacgatttaactagcaccacgcgtataagtacacataaagcaactgtggcacctcattcaacgctagatagacagttacaaaatttaaggagttattttgctactttgaaggaatatggtgtcttaaagaatcctattcctatgaagccattaactaagttttttagacgtgatgaaatgaatgcccctgttaagaaatatgttttcactaataatgaaattaatgttcttaaagatagaatttatagagagcttggagtaacaagaataagttattggacaactagaattgctatcttgatagctctagatactggaatgagacctcaagaaattcaggctttaaagtggagtcaaattactaatgatggaagttttaaagtttttagaataaatgactcatggaatgaaaaagagaagcatcttaacggacatttgaaaagtcgaccgcatggagaatctagactaacccttcccctttctgaaccacttttgcagttattgaataagtttcgtcattgtcagttagaacttttaaaggagaatggtttaactaattttaatgatcgaattttattgaacatcacagattatcacttgtgcgcattagggtatccaataactcaaaaaagtatgaatgatatgttgaaacagttgagtaagaaagtaggggttaataatcaaaatttaaatataagtatgtatacttgtcgtcatactgtagcaacaaaattagggaatacaccaggcatgtcttacccttgggcggcaagcagattagggcattctttaaagatgtttatgcggacatatgtacatgttgatgaagatcgaaatgaagaaatgcttagattgatagctaaaagataaaagaaaaatgcaaaaataacttatatttgataaaaaaatgaattaatgtagtaatagcaagaatttgaaaataataaataacaaataatttttaacattttatagattttgaaaaaaaaagagcgtatactcagggcatcataaagagatgtgaaggagaaatcaaaatggttattgtagaacaaaagtttaataaatataatcatacaagcaacatggatgctatggagtacgctgcaggatgttgcacatgtacaacaacaagttgtacaacttcatgtgccgctgtagctgaaagttaatggatagttggcgctgtaaattatattacagtgctttttttaggagtataaatactgttatgtgtctattaagaataaaagacttaaaagttaattttaaggatcaaacagtactggattttagaggtcatgatatagagataaagtcaggagacaaagtagctctaattggaaaaaatggggcaggaaaaagtacactattaaattgtcttttacatgaagtaaaatacactggctgtataaaggagaagtatcatcagtcggatataggagtagtttttcaagaaaatgtatattttaaattcttgaaagtttatgaaatctttgaattagtgtggaataaacctaaaaagttaattttaaaatctaaatttattaagaattttaatttagcaagcattatgaataaatacatttctgacttatctggtggtgaaaaacagagattaacaatagctttggttttttctcaaaataaaaagatttacttactagatgaaataaattccggcttagattatgataacaggcatgaattaagtaaaatcataaataatattactgaagaaaaaacagtaatacaaataagtcattattttgaagaagttgaaaattgggctaataaattgataatccttgatagaggcaagatgatatattttggaagcttatctaagttttattctataaataagcatgattcattaattattataaatgataaaaaaagcctatctagactgacccagaagcctttaaatctttatagtaataaatatattgtatctagtagtattgatgagagacatgatataacaaatttattagagcaacaaaagatagattataaagtggtgccacaaaatttatacacaacttataaattagcattagtaaaacatgaggataggtaaaataatggctagagaaattttattaagtttaaaagcacaacttagagttccaattgctgtatttttttctattttttttccaattattatgatgattatgatgatgacatcttacggtaatttttcattaagaaatggatatcactttatagataagtatttttttattagtactactataggtattctacctctaaccttaattagttttcctattgatataaataatttgcttgaaactaagcattacttacgtttgaaatacttaaatgttgatttaaaaaaattatttttatcaaatattatttcttatttgataattgtatttatttcagttggaataaatttaatagtaggaaaaagtatatataatttaagattacctagtatagagtatttatgttatttttttattcaattattctattgtgcgatagttctacttatatttggcttactgttaagtttaatagtatcagatatcaaagctttaatgcctgtaggaatgactataatgtttatattatttatggttataggtgtttttgtacagtatagctccttaccgaaaattatacgtactatttctagctacataccagtaaaatatttggcaaatgatttctattatatctggattggtcaggctaaatggaatatgccattttttaaatgtaatacgatctggcttatttttctgtgtttgatttgttacataatttatagaaggaagaataatgttacgaagattttcaactagtaaggatttaagaattgggatagagataatagttggaatcactttatcatttatcattaattttataatgatttcaattgggtatgccattacaaatagtgaaaaattaaaagaatattcggtcaattattttggattagtcatatataaaataaagaattatggaaataaaggtataccagtttccaataatatgatgtttatcggaatagttttaacaataatatttgtttttattgtagagtgggttgtatataagagggataagaatggtagagtatgagcttaaaggattatttaatcaaaatacgctttcaacatcagatattagtaataataataattacaataatcaacaattatttgatcatattataagaggaaatgctaattctgagatgctgacatacttacttaatatgaaccatcagcgattgaatgattttaagagtatgcatcaatataattatggaaattttgcatccttaatgaacagtgtagaacagtataacgaaatagaaaatgatgaaactattttgctacctaagccattgagaataaaaaataagttacagcaggttctaaagaaaagaaaaagtgttagaaattatatcaatgtcattaagttaagacattgacaaattgaatctaatctctgtagaaccgaatcattatgatttggttctttttttgcataaaataaaggcgaaaagaacctaccttttcgccctctgattaaattattaaaccttcaaaattattgccagaaagctggtgttaattatgaaagcccttcacagaaatattttagatcgtcttgatcaaattatcaatgatactggaaagcatattcatgattttatcgatgatcctcatgccttcactaggaagcggtttttagatgcagctacagtcattaaaactactattaatatgcaaggaaaagatttgaccagtgagttgtttagagcttttggccaaaaagctattaaaaataacgataaagtagtcagtacttccgcttatgtccaacgcaaaggtcagctttcacccgcatgttttaagcatattctaactgtatttaatcagaatttatttaatatccagttatttgatcataaatatcgtatatttgccattgatgggtctgattttaatcaaatctggaatcctaaatcagagaatatcgttggaaatctcaatcataaaggaaagccatattgccaaattcatgttaatgcactctatgacctgttaaataatacttatcaagactgcatctttcagcctaagtcaaagatggatgaacgtaaagccgccgttcaaatgcttaaaaagctaaattgcggaccatatatagttactatggatcgaggttataccggctttaacatgattgaaaattgtaatcgcctgcctaactgttattatgtcatacgtactaaaacgggatatggcgcatttaaggaagtagctgagttgcctaatcaagagtgtgataaggatatagcttgctgggtgactacctctaattattattatgaaacccataaggctacagaaaacgttcatttggttaaccatcattaccgtcaatatataaaatatcggtctaaaaataccaaagatggcagctgggactttggagagttatgtacaataaaatttcgtgcctgtaaatttagaattaatgatcctaaatcaggcaaagaagaatgggaagttgttctaactaatctaaatagagccgattatcccttaaaaaggatcaaagaaatctaccatttgcgctggggcattgaaacttcattcaaaaagttgaaatatgctttaggtagcgtacagtttcattccaagcaggatagatttattgaaatggagatctatgcccacatgattatgtttaacgcagtcagtcaaattgatgctcaagcatatgtaccacaaaaaaaatgcaagtatcaatatgcgatcaatttcaaacagtcatgttttgtcatccaggctatgtatataatttcttcttcaactgaaatctttaaaaagattcttattcaaattagtcattacacaattccgatcagaccaggacgaaaagacaaaagaaatctcaaacccaaatcagctgtatattatttatatcgtgtagcctaatttctaaacaagatttgggtttatttggcatgaaaaaagagcattcaaatgcgataaatcgcaaatgaatgatcttaaaagtccaagtcgataatttgtcaatgtcttaacttaatgacattggaaattatataggcttatcatgtgatttacgagaattgtccacaatattgatgtattcatttggaatctcgggaagaaaagagaattttggtggaatagtcgcaagtatgcgatattacgcttctggaggtgctctatatccaatttcagtgattatatatataaataaggtggatggattgaaaaaggggctgtatttatatcagccaatgtatcattccttattaccactaaatattaaaactcaaatcgatattaataaattatttgtaggaagtaacattgatgttaaaaatagtagcttttttgtattttataaatatgcgattagttctacatatttaaaatatggtgagctatctttagctaatattttgattgaagcgggaatgatggcgcaaaatttttccttagtaactacagcatgtggttttgggtcatgtccaattgcaggatataacaaaagatttattgaagatatttgtaatttagatcatgttaatgagcatataatttttactgaaagttgtgggagaaatgaatagcgatacgattttttttgtaaaaaaagatacacatattaattctaatataaacgaatggatattaagtaagggaataattcataaaagcactttaacaataagtaaaaatgaaagtagtactttgtttgtaagtttattcaagcaattaatacaaaatcaggaaattaaagttagtgaagatgatgaagagtattcagactttaaaaaacttgttcagcttggatttttaggaataagaaataaaaataaaaaagtagcacttattgtggaagaaagtgcaaaaaacttctttgaaaactatttaaaagatgaaaatatatgtgttagctcattagatgagtttataactcaagatacattaaatattttaattgaagaaaaaaataatactaaattaaataaaatagttcaaaactataaaaataaatacaaagatgtagatttgatttttgtttgttctttgtattatgaaaattatttaaaaggaatcaacaagctaactaaattaattagtatcccatataatataggattttatgataataataatatatttgctactagaataatacatggagagactggctgctatcaatgtcttgaaaatcaaatactacaaaaatttgatggatatatcgaagattatgtatcagaaatggattctgaaaaacaagtatttgatataaaaaattatggagtattaatatctataattaagtcagagatagaagaactaaatttatactctgatacagagctacgaggaaatgttcttcatttttatttacctacttatgaatacaattttgataagaatagaattcaaagtgattgctcagtttgttctactataaataatattttatttaaagaacaaaatatgaaagcgtgcaatattttagccgaggttttaggtaatgataaatatcaagaataatttagaatataatttattgcgtcaacggatcttgggtggcgctataactggaatctggaaaaaggatactttctttattggcgaaagttcgtatccggtaatgaattataattatattactgcaaactttactaattttgaaaaattcgcttttcctggctatgttcccccgattaattatcatcttagtggctacggcttatcttataataaagctttatcggcttttctaggtgaaagtacagaaagatattctttttcagtcttatatcaaaacattaagcataatatcatttattctgattatcaaaatcttcagaaaaagtattctaattgttatatagtacctttaaattatattaatatttatttttcaaaagaagataaagaaaattatataactaaaaaagatccaataagatggatagcattaaattcactatttgatattaataaaaaggtactagttccgcttcagttttatattatgtataccaacagtatatttaaaaatgaaaaaagaattgtaaatagtgctacatcaacaggaactgcttcgcaagaaagctttgataaaagtctggaaaatgccatagttgagttcttacaaatagattcttttaatctttggtggtatggaggtctaagaggtaaaaatttaaatattgatacagaaggcttattaaaggaattgttcccaaacaataatagactttggatgtttttaaaaaaatttacggttaattttatagatattagttttgacaaagcaattaatgtagttgtttgcgaaattaccagtaatagtgatagtaaactacctaaatatgtagtaggagttcaaggaggattttgtttaaataagtgtattgaacgatccttttttgaatgtgtaactgttttagaatattgttttactcaaagttgggttgaaggttctaaatttaaaaagatttctacaaatatagatgatttaaatgtaaataatttagacgataatgtattgttttatgctaaaaatggaaagcctaaattaatcaaaaaagagaatattttaagagtgtccaaaaaggttactaatttaaaagatttgcttttgaatttaaagagcatctctaagtatgcaggatatttaaatattacgcctccagaatttagaaatcaaaactttgaaatatgtagagtatttataccagagcttttaccaatttctttaccgtcttatccgccttattatcatccaagatacagtaaaataggaggtattattaataatgtcccccatcctttggcttaaaatagcttttttcatcactttgtttccaggcggaatatatttgataataagaagaatattgtccagccatagaaaaagcataacagtatatttaataaccttggtaattgtagctattgtaaataccattattttaaagatcaattttaataggtatattgaaatcatcttaatattgattattccttttacgtattatttttttgagtatgttataaggtataaaagattcaatatcttaagttttaaggctaataaaacaattatttatgttttagttttttttcctatatttgaagaagttgtttaccgtttctttatatttaaatattgttcggttttaggcttttctggaatacaggctatgatatttgcaacgttatgctttgaattttcgcacatatattatttaggctttaaagctattaataaattatttttttcctttattcaaagtatgttgtttttggtttttcaaagtttattgttgaaactgtcaaatcttttgtgtaaatagatctttctcgtaaattgattttttaattatttatttaatcaaagtaggattctaaggtgtcctgaacctgaccaaagcctttatgaattcgattgaaataacggtcattgtagctcattgcctgaatgccaataaaagcatcaagcgactgttcagttggaaactctgccttaggcttagctttgcgcttgatcacattgttaaatgattcaatcatgttagtcgaataaattgaagctctgatctgcttgggatagttataaaagaccagcagatctggttctatgtctttcaagcttctgataacatggctgtaaaccttgccccatttggtatagaagtcatgcaggacagctgtggcttcttctttgtttgtctgttgatgcacctgtttgaattcgttcatgatcttttcacgatcgtcgacgcgtactttagcgcagatattgcgcatgacatgaaccaaacagcgttgaaaatgagctttaggataagtcctggccaaggctgttttcatgccaacaacaccatcagaaagaaaaagctcaacttgctttaagcctcgggatttcatgttttgaagcatatctgtccagacttcaatgttctcgctaggcgcaatgcagtagtcaatgacctccttgtgcccattaggcttgatgccaatggcaatatagactgcttcacgctcaaatgtttctcggcgcaaaggaaggtatgtcgcatccaaatagacgcagaaaaacttgtcgcttagcttgcgtttgtggtaagcctcaacctttggaatcatctgcttggaaatatttgatacctgagctggactgtaatggctgccatacatcttttcaattagatcggctatttccctggtggtcacgcccttggagtaaagcttgataatcatgctttccaagatatccgagtgctgcttgtagtcaggcagcgtgtgctgatgaaattgaccgttgcgatcccggggcacttgcacttcaattgggccaaattgcgtatcaactttgcggaaataagcaccatttctagagttgccagtattccagccatttctggcatagggatcatagcccagaaaggcagtcaattcagcttctaacaagttattaacagcctgttgtagctctttgcgcaataaatcatttattttgtctggattgaatagagcttgagcaaaatctttggtaaaatcattcatgaaggagttcttctttctgtatgtgtttttttgttcaaaccaatcatacgagaaaggaactcctttttctaatgtttaaagaaataaatttaaggaatcattcatccttacacaaactattttacagtctcttaatttgacaagcaatatacagaaattatcaataaaaagtacgttttgctataccttttcataaacctgactacaatgagagttgaagaaggcgtttttgtatgacaaaagaatatgaaaaagaagtcaaagaagcagaaagcgtattggaggaccaaaagttaactgatagtgagatttcacaagaattgatttccaaagataatccaactgaaaatgtaaaaccatctgagattgatttcttgcgtaaaaagccaaatttgacaacgcaaattgatttcactttgttagctgatcttgctgggttatccaaggaagctaaggcagaagcggctgtatagataaaaattttacgtagaaaaaagaccggtttgaaccgatctttatcttataaaaatttactttaggagcgtttgtgaaacttagctactccccaactgattagatagaaagtcgaaatcaaaatgaattgaatttttaattctaaaatgaatagtggaaagtaaaataaaacggaaaacaatagaataatagcgtaaattccttcgaatgttagaaataatctgtttctttttctatttttaagtgttgctagtatcattttttcattcacaaagatccctcctaaaaattatgaaattaagaccaacttaaataaggaatagtccatcggataggaacacctaggagccaatgtccggagctgagaaaagtgttttttaacacaacggtagtaacaattgcaataactgcgagtactaccaataagattagtaatgtactttgtttaatttttgacatgattaatgcatcctcctaatattttttaaacttctattattttgctgggataatgaccggtaattgccaccacattactgtagcctcctcccttttttaatcatttagtcggtttggttaaatactactccttagtgactagaacagattaattttgtatcacatagtttacaaattatttgggccaagttttaattaaatcttgataaccatatttttgtacttcatttctaattttttgcgcttcctctttattgtttaaaaataaattctttaaatataaagcagcaatcttataaagcaaaaaatgtatggttggttttgattccatgatgtagtcaattatttttggaacatgcattaattgaagtgattttttagaaagttttctattatagcaaaccgctagataattctcgaagacacgcaagtatctttcttgttctaattcggagatatttttattgcttttcatctcgttaagtagtctattgataaaaaatgcaagggtatcttgttcccagagcggcattgtattagtaaaaagtcgcagtaattcaggattagtcatccagttttgtccttcgttaaattcaatgaatagatctttttttattttgggatcgatttgatttaatttattttttaaatatgctacagaaatcatagctcttaattttaaaatcttagagtgagattgtgacagaatttcttgatagcatgattcaatttcatcaatttttcctacattgaaggcttgttccattttattatttaaatctgattcaatctttttttgctttgaagtataggttgctcgcaataattggtaaaagtaagtaatatcaacatcatgttcaaaaagaatcgcggctaatttatctgcactaattctgctttttcccgcttctactttcgcataaaaaggccgagtaacaatgttagcagccatttctttttgagtgaggtctagattttgtctaatttttcgtagtgcttgtccaatagtcataaaaaatcctttactctaaaatattttcttctctacgatatatgattattataaatgatgaaaatataagcggataaattaaagagaactatggatatcggaacggcattaagacatttgagagatgatctaggtttgacacaaaagcaaatgattcaggggacgaaaataactgttagtcactattctaaattagagaagggacaaaacaggatatttatcgaaaacctagtcgagatattgaagcaacgaaatatttctttatcatattttgttgatcactatcttaatgatgaaaatagtgaaaaagaagtaaattattcagaaatattaaatattgctttttacgaaaaagataagatcgctgctgaagaaataaaacgacaaattttttcagataagagttctagcaatgaattgagagatagagcaacattaattgtggatatgatagacaaccagggacagagtaatgttgatgctcgaatcattaattctattttcaaacatgacaactggactcagtatgacgaggcaataatattattgggtaatattattagaactagtaatgtattaaatatgagtcctttggtattgactctaattagaaaatataaagatctagataaagaaaaaatcgaaaaacaaagaaggttagcaacggttggaattaattatttatttaattttcgaaagttaagtaaagagtttaataaaactgtgctaaaaattataagctggattaaaacaacatcgattgttcctgagttaggcattattcgagaattaaatgcatattttttagcagtttatgaaggaaacatttctgtctcaactaatatcaaaaatgtccttaaaatatcaggttatcaaaatcttgctaatgatttacctaattaatcccctgagaggggattgagttgctgtggaatgagaagtagataaaatcatagttaattaaatatgaaagagaggcatagtaatttgattattgttagttatccagttttacctgaataactctgagttcatacagtacgaggagatataaattatgaaaaaaagattttgttaagcctaagtttagtagtattaggaaatactttgttttttaattcgagtgtagcttctgcagcgactaataatagatattccgtaaataatacaattcgtcaggcacctaatactggcgatgttcctggtggatggggcattactcctggtcatacacattggggctaagtgatagaagcgatgaatgaattttcattgctctttttattttgggatgcgaattttatgaagaaaagtaaaatcatatttttaatagagcttgtattaaatattattgctgctgtttttctagtaataaataattcattcaaaaatttattagatgtaggcgttgtatttttactacttctattgcttatttggaattttttaagaagaaaaattgagattagtttaaaactatcatggctcaatcttatgatattaccagcaatttttacttattgcttaaatactgtagctaatgttttattggtaaaatatcctgttaaaagtgttttaatagctataatttatagtttgttattcttagtttatttgcttccggtagtaattactaatgcgggattggttaagaataagtatgctagagtttttattgcaatgtattatattgtgctattactttttagcgaaaacttacatatgaatgactacttatcatcctttgtaaattggtctcactctgaaattcttaatgggttagcgttaattccaatcatattttgcttatttaaaagttgggatattcgagcaaagcttaatcttaaatttaggcgatattcaaatatacagttaatagttttattagtagctgtattctttgctgcttggtattccttctttcatagctatgtttatattgcaccaactttttcgcaattattttggaattgggacttctcggaaattatcccaactgaacgagctgttttatggagtttaggagcgattttattcgaagaaggattccggtatctattaataattgtattgcttgaagtttttaaagtgcaaaggggtcaaattgactattttcttgagtgcgctattttttggattgatacattatgccggactacttgaccaaggcccaatatttataatttcaacgcaagcaatttttgcttttggttatggctgctttttggcgacactgtacttatattctggaaaattctggttagtattgctttcacatttttcattagatcttattgcattctcgctttctgcaggtggtggcggaatactatcatggtatggcaataatgatctcttgagtaatggtttgagcatggtttttgctttagttatgacattgattatgtttttaggtaaacaaaggaaaattatgcaagaaaatgctgctagattaattaatgcatgatgcatttaagatggtcgaaagatcatcttttttatgcaataaagtgtcatatataattgacacctactataaaagttgctattattttaaaaacgtcacatataaatgacatctaactagatgaataaagaagaattcaatgaatcgagtaagggaatatcgtaagcaaaagcaaatatcacaaatggagcttgctagacgaataggggtggcaaggcaaaccattaatttgattgagaatgataagtataatccatcgttagaattatgcctaaacttggcgcatgcattaggaacggatttgaatactttgttttgggatggggatgaagcaaaatgagacgagaaagtttatggcttaagtttgtcagatattggtatggcattgatagtaaattagacgagcggcaattagcagaggttgaacgaatcggtaataatgcctatgtaatctctggtatagtggaactgatcttactggttatcacgctaattatggcattgactattaaaagtgagctggctttgtggtttttacctttggcgattgcaattatgatgctgatgatgagtgcttatacttatttgacaatgcgaaaatttaaaatattctctgtcgaaattacagcagatgaacgccccaaagcaattcgtagaatatggataaaggctataatagcgggaataattggtgcagtttttggtacattaggtagcgcgctaggagcttcttctgtgcaaaataatctagtaaatgtgcttgatttttggccacaaggtttatggctaggcgtatgttgcggtgctggtagtgcgattggaagagtgcaacgattgaaagtaattaaagaagacgaataagcgaatcgaaagtagtcgatccgctttttttgctgaaaaactatataattaaagtaacaataaaatttacagcaaggcaaaaaggatgaaaaaacaaaataagactggctcaattggcgtagtgggtgccacggccatcggtgttggtggcatgatgggagcaggcctatatacattgctcggcttggccgccaactctgctggtgtttggctgccagtatcatttctaattggaggcattgtggccgcattttcagtttattcgtattcaaagttaggaatgaagtatccagatcgaggcggtgccgctaagtttttgctaaaagaattcggagatggcctgctagctggtgggatgaacgtcttccagtatatcggctggattatcgccatggcgttatatgcgaccggatttgcggaatatgcctgccaactattgggaaaatcaagctcaggctggctaggtaaggcaatcagtatcggaattgtcatcgtggttgtggcaattaatattatgggttcaaagcaagtggcacgtgcgcaaacggcaattattgcgtttgaattgttaatcttactgtcttttgtagcggtaggtttaactaagctgcatgtgccgacaattactagttcaaatagcggcaatattgtaggtatcctatctgctgcgggtttactttacgtaacttatgaaggttttggcgtagttactaacgctgcagggagtatggtaaatcctaaaaagcagttgccacaagcgctgttcttttcattagggatcgtcatggtgatttacattgtagctagtgtagtcgtggtgatgaccttaggcgttcaaggcgcagtagctaatcaaggccacgttttggcaacggctggtaagctagtattaggcaactggggtctgttcatcacttcactgattgtctgcatcttcgttgtgattttcccattatcagctgttggtgagatggccagcctagcctttttattggtgtatgccatggttaacttaggccacttgcgcattgcaggacaaactggggccaagcgctggattttgatttgctctgttgtattgaatctagctttgtttgctttgttgtttattcagacaattctcaaccacgaaactttaacttggatttcagtaattgctttgttaattattagttttttagttgaacttgcttggcgaaaaaagaataaacgcaacctgcattgattaggaaaaaaatagtaatttatgatacaaaaagtcgacttttgttccacttattgggtacaaaagtcggctttttgtttttttcgttgtcaaaacaatatctttaatattttaattcagatatactctctttgatcaagtttgaagtgagggaaaatgaatgaaaaagttattgatcggaagcgcagtcttagctgccttattaattaaagaaaatatcgcagtaaatgcggcaatagagcaaaacgaaacaacgcctaagattgcagttactgacaaaaaagagaagccaaaagaccagtctgataatagttttgcaggtcattatgaccaagagacaaattttattacctgggaaataaggctgaatcccaagaaagaaaaatatactggtgatttgaagttggaaaatttaattccagaaggcttagttctagatccagatacgattgaagtaattaagaatgataattttattcaaaattctagtttagttaaattgaagaaaaacaaattaacagctgaatttcctgctaagaagtattcagagagcacaattttgattaagtatcgaaccaaggtggaagcagagcctaatgagcctaattatcttcgggtgagtcagtcctttactttgggcgatgatcgagttcaagaatacgagcaagaaattaaatacgatcgaagtaataagaattttaacattgaagcgccacataaatctacgtttagagatgataatcaaatttcgttaattaaaaaatctaaaagtaatgaagaacgctctgaagattggcttaaacgtctagcagagctgattattaataaaaaagaaactacttcagataaaggaggtgaaaaagttcaaggacaggtcaaagatcaaaagcagcaagcttccccagaaaatacaaacctttcacgcactccaactgtcaaaggcttgactggttttgatactaaggctaacgaggtaaaatccacagctaaaatagattctgattcagtaaaaactactctagataaagacgagattaaggacaatgcaagtactatctcgcctaagtcgcaaaaacacgatactcatgtcacactccctaaaagtgacacatcagaaactaaggcaaaattacctaaagctggtgaaactgccggtgttatgctcagcgtatttggcataattttaataattgcagggtggacagttcgaacaaaattcttaaaataatctatatttgtactaaaatacggattttcaatagccaaaatagactctttcacgtattatttagatagataaacttgtatcatgaaagagaaacaaacatgccgtacactatttcagaaattattgttttattttttacttattcagttatcggctggctttgggaaaccttttattgttcgatcaaagaccaccattatgattatcggggatttctgtttggtccttactgccccgtatatgggttcgccgttactacaattttaatttgtaccaaagacgtgcgagataacctgctccttttatttatagtagggactatcgttgccactattttcgaatttgtggctagttggctattagagacaatctttcacatgaagctttggaattattcaaaattatggggtaacattcaaggtcgagtggccccaatgatttcattattttggggcgttggtgtagttttattagtaaaatttattcagccaatcattcagaagctcattaataatgaagaaaagataactcatggctggctagctgtgggtattaccattgttatgggtattgacttagtattaacagtaatcagtgtcgagagattccatactacaactaagatgtgggatgtgcatgttaaccactttattgagcgagttagaactaaagtagaaagtcatatgcctgagaaaggaaaattgcgggttggtgattggcaccactcagtgatgcagcactatgatgaattacaaccgcaacgattaagctggaatcataagcgctacttgaagagctttccaaaattaaaagttactgatgctcctaagttcatggaaattaagaaagaagtcttgaagaaagaaagctaactaacataatcttattttgtgggattgaaaaaagtcggatgatcatattaggtcatccgactttttcttatccattaattctatttggttcacgttttttactttttatttcggtgtagttatctaaaacgttggcatagcgtccaagggtgaaaaggtaatcagataatcgattgaggtattttaatacgtcatctgataattcctgttcatttaaacttaatttgaccaatataatagcaacaccatcaactcctgaaactactgaagaagaacatctgacagtaaaagatcatgtgggttcatcaactttaagaagaggattaccacaaactggtgaaaagaaatctactttgaatgcaggctttgcccttgctggcataggcttggctttgcttgcagggatgttgtttgatcctaaaaagaagcactaatactgaataagaattaagttcgttaaagatcgaatcattttgggttcgatcttttttagtaacaaaatttaaaaaatcccaccttcgtgaataattgaatactttatatatttcaatcgtccactttagtgggattgtattaattcaggatgatctttttgaatttcctgtttttgaagggcagaccaagtccatggaagagttttttagtcgcctagaaactataggcaaggcttggcataaagcctatgataccattgattccgatacagatagagtcattaagagaactaaaatggatgctcgtactacgttagacctactagaacatctatcacctgtacagttctcttgaagagaaaaagaatatcagcacgtcaccagtatggttcttagactatgatcaaaaaatttattgtactgatgatgccatcattggtcagatgcttcaaaccattaatcatgacattacccgacgcagcagtcgtagcttattacactggaaaattcttaaacaaaattgttccagaaatttttatttttgatggatattattttttgcttggttctaagcgattttatttatcaaagttaatagttctatgttatattataagtgttataataatgtaaaaattattaagcattgaaatatagtgcattatgatacgaggagaaagatcatgttagaaagagtcccaaaatatacactaagaaaactgtcagttggcttggcctcagtgatgattggatcaggaatactgatgaactctccaaaggtacttgctgatactattaacccaaatgaaggtactagtactgctgttcaaccttctagtcaagataaagataatagtgagccaagtactcaatctggtgctactcaagatgaaaacattgattctaacgcagctgttcaagagagaagcgacaactcagttactgaaccagcaaccacaactaatgctgaagaaaaagtagtggcaacaaatacccaagatactacgcaagataaagacaagcagacaaatgcgaatgaaactacgcaaaatactaccaatgtcgacaaaaaagatactgaagtaacgccgactaacgacgcaacaacagctacaccgaagacaaccgccaaggttaacgcaccggctgcaccaacagcaatgaaggcagcagctactgctgaaacaccagatccaacggttccagataactcagctaatactgctattatcaatgacaagaatagtttggaaaaaatttggcttgaaacatctactgcgcgggcccaggtctacactaccgttaagggaactgatcaaaaaatctatgtcagttcctatgcagaattcggtaagcgacttaattcattaatttttactaatcgctttgatccaaatagtctagaattacacattgaatatcaggtgttaaaggatagggttcaaaatttcattgtaaattggggagactggctccgactagataccagtagaattggtaaagatggtctaactttcactacagatacaggtgaaaaagtagcctatacgttaacaccaggatggggggaagtacaaaacctatgatgaatggcttagtgaaggccaagatatgagtaagataaatgctcttaaaattggcaacaatttaaaggccgggactaacttcgtattaaccgttcccctaaaatatattggtagaactgatggcacaaagcaatttaacaatgttcaagttgtagattacgggcagccaaatgctaatatggtgttcgattttattgaattacatccagagcaaatcgatactccagaagctccaactactgataaagagtcagttactaccggtatctataacaatccgttagctactgctacagactggtataaaacggagcatggtgaatatgttgcatactatacagctaaagggaaagatggtaagacctatgtaactggatatgtggctgccaatggtaagtctgagtcgattatcaatgttgatcagattgatctaaataccttggaataccatatgatttaccgtaatggtgacgaagaagtagcggccggtatttcagcaagctttgctgatggtaagactctagtggttgatgctagtcgtataggtgctgatggtatccgtttgaagagtcaacagggttggtcttataacaacgggggttatagagagaatactagtgggagactctattatagttgggaagattttcttaagaaccataacggatcggtagataacctcgttggcatcaatatgaatgcatccgctttcaagccgggcgatacaattgaagtagttgttcctgttaggtatattgggaaactttctgatcaagttcaatccttagaatttaaatctgaagctagaaaagatgtttcggttaaactctacttcacaactgtgcgcaaggacttaagccaggttaagcaggtagtcttgcttccgactgagttcatgggagaacaacctggtcaatcaaactggaagctggttaaggaaattgaaaaagatatgccaaatgggtgggaggccattaaaattagtaacttcccaacctataagggatcattcaatatggattcactaccaaaaggggacttaccatcggttgtttatggctctgcgcaatactttgttgacctccaagaaattcagaaaatttttgctaaccatggttacacggtcaagtatgctaacaacaacggtaaagctcaggaaatgccattctatggatacgttaccctgccactggcccttattgatggtggtggtaaacctgttgccccatctatctggacaatccaagttcaagctgtgcctgctattattttaaataaagatcaacactatgtggcagatccgaatgctaagccatgggacaccacttcaatgattgatgagatttatgctgctgatgacgcaggacagcggaagacgcgcgatcaactagaaaagttgccaaagacggacgtggatattagttatgaataccaagctccaggggctgctacagctgctccggttgataaggtcgacttgactaaggcgggggtatacactgtcacttacagtcatacttatgctgatgggcgagtagttaaggatagtcgcaaggtttatgttgatgatgttaagcaagaaaccaaggacattactcgaacaattattgtccacgagccaaacggaactgaccaaacagttatccaaaaagcaacattgacacggaaagtaattcttgatgcaactactggggaaatcaaatctgtgggtggatggtctactgctaagtgggaaagatactcagctccagaatttaaaggttacactccagccccggctcaaattgatgaaactgctgtgaacaaggacactcaggatacaactgttgagattagctatacagctaatgagatcacaaagccagaaaccaaggacattactcgaacaattattgtccacgagccaaacggaactgaccaaaaagttatccaaaaagcaacattgacacgggaagtgattctttatgcacctactgggaaaatcaaatctgtgggtgaatggtctactgctaagtgggaaagatactcagctccagaatttgaagattacactccagccccagctcaaattgatgaaactgctgtgaacaaggacactcaggatacaactgttgagattagctatacagctaatgagatcacaaagccagaaaccaaggacattactcgaacaattattgtccacacgccaagcggaactgaccaaaaagttatccaaaaagcaacattgacacgggaagtgattctttatgcacctactgggaaaatcaaatctgtgggtgaatggtctactgctaagtgggaaagatactcagctccagaatttaaaggttacactccagccccagctcaaattgatgaaactactgtgaacgagaacactcaggatacaactgttgagattagctatacagctaatgagaccccagagcaaccagataacagcaaggacaaaggtaataatgacaacaatggtggtaacaattcagatgcgattgtgccaataaatcctagtgacaataactcaaataattcaaataatgcaccaactgacaataagaagactgatgacaccaagaaagataatactggcaagaagattacaaaggagactcctaagaaggtaaagaataataagtctaacaagaccaaatcaacgactacttctaaatctaaccagtcttcaaaggctaagcgaaccactaaatctggtacgattagtcctaaggcagtcgctttagctaatactactgctggtctagctacttcagctaaggcaaatatggaaaacggtattgccaagaacaacagccaaaattctcaaactttgccacagactggtgaaaatgaaagtaaggtagcatttgccgttgccgggttgttagcagctgctttgggcatttttggtatagctattaatcataaaaaagaaaattaattagctaagttgaataaatcatacaaaaagacgcatagaatagcaatgtcattaagttaagacattgacgaaaatcagactttatgaaccgaattattttggctctttgtcaaacaccctaaagtataaaggtagatagaaacatgacgatgtttttatctaccttttttcttatacttagattgagcttgcggttgaacccttcaaggcagccgttagaataaggcagttttgctccattaagcacagcttttaggttatgtttaaaggtcaatagtgttttgtgcattaaagtcccaatttgatcttggcagttgattaataagttgagctcatgagtattgcccgtttcaacggcttgaataaagctttgcatcaggttatatgaattctctaaggtagtgctggtattgatgccttctgtaactacttgtgcttgagttaagcagtctttgtagtgccagttatagtgaggatgaactttttcaagttcatcaaacttcttcaagtataatttccaaggagacttaagcagctgatattgccgcgatcttttatcaaaggtcttcatgacttggaacctcagcgagttgaatgagcgcgtaagcatttgaatcatgtgaaaacgatcaatgacaatctgtgcattaggaaaacaagctctaacgatatcttgatagtaaaaattaagatccatcgtgaccgttttaacgttagctctagcttggagcgagaaacgaccaaaatacttaagcagcgtcttcttgtagcgagttctaagaatctgaacgacttgatgattatcaccatccaggcagataaagtgcagctggcggtaactcatcaaaagctaaatgagctggcaaatattcgtagctgtcaataaaccggtgtgaacagttgcccagtactctttgaacagtattaattgaaatattgttttctctggcaatgctggtcatagatcgatcttcagttaaagctgacaacactttaagcttagaggcattagaaatagaacagtatttaccaattcagactgagccatagatcagcgctcacaagtgcgacatttaactcgttgcttagctaatcttataatgaccggtaagcttgcattagctgtcggatagtgaatgttggtaatcaaatggccattatgtaagagatctagggagccgcagaaaggacaagcaggttgaagcaattcagcttcatagattttatgcttttgcagtttgatcgatttatagaaatcacctttatttataagaatttgtgtggaaacgatttttattgaagaggactatgtcctcttttttgcaataaaaaatcctgttaacagcttatcatatagataagtcatcaacaggaaaaattatagagccaatattttgagattaattgataggggttgaaaagtaaattttatttgttatagaaaatatagaaaaaggattgttcaagaaattattttacgaaacctgcagtgaaccaagtgttggcactaggcttaagtgaccagccagtgaccttcttgttaacagcagtgattgagtattggttggtagttggcacaacgtatgcttcatcatacatccacttttgccacttcttgaaggcattagcacggtaagtaggattgaaggccttctctgagtcgatatcagccaaaagcttagtttgcttaggtgaaacgaaacgagcaaagttgtatggtgcagcttcattgtaaaggtcgttaggggatggttcacttgaaagtgaccaaccaccttcgaagacgtcgattcttggatcgtcagattgaacagcttgtacccagttgttgaattccattggacggccgccgacaaatttaacatccaaaccaactttcttccattgttggatgtagtttctccaaacaggttcagcggtagttgagttgtttctaacagccaagttaattactaacttcttgccgttaggttgaactctgtattcacccttcttcttgtagccggctttatccaataattcgttagccttcttcaagttgtatgggtaacccttgattgacttgtcagtataatcaccaaattgttcagggatcaaagtgttaacgcggaaggccaagccgtggtagtaacgtttagcgactgcatcaacgttcattgcataagccattgccttacgcaatgatggattgtccatcttggagttcttgttttcaacgttcttgccagacttcttatcccatttacctaccttaaagcctaagtagttgtaggataggggaaccttaccaatgaagttggtatcagtagcgttcttaacatcatcccattgggtgttaactacgccagctatgtcgaacttgtgactcttgatggcttgagtaactgagttggtaccgatgactgtcatggataccttttccaagtttggtgtaccacgccagtaatgcgggttacgttcccaagtgacagattgaccacgaacaagcttgcttacgcggaatgggccgtagaagagtggttgttttctaaccttgtcactagacatcaacttggagaatggtacgtcctttaagtaatggtaaggttcagcgtattcccagaagtaaccgttacctgattgaagcataccaggcttcatttgtttcgaccttgcggccatcttcgccatcaggcatctcaataccagaaatcttcttgctcttgccttcgtgatattctgctaaaccaacaatgtcggcaagagaatcggtataacgttgtgacttggagtctttattagcgataatttcataagcgtattccacgtctttagcattaacttgcttgccgtctgaccacttaacacccttcttaacctcgatagttacggtcttggctttacggtcaagcttaaaggtagcagcacctttattgttaatcttgtattgatcgttgactgagaataacccttcttgtcctggctctgcaacttcactgtcagtggcagtatcagataattctggcaagaaaataccagtgaagggactatcagattcgatagcataatttaaagtgccaccttttttaacacttttcacaggaacagtttgactgaatttgtgatgtgtttcatctgcattattattttttgaatttttattattaccacaggcaaccaaacttaaagctgccccagaaacaagtgctaatgcaccaaaatatcgttttgctttactcattcaaaaagcacctccaaataaattaaaaatatttgagttttattctatgatattaaaatgaaaaaaacaatagaaagatgaataaaaatgtgaaaaatattatttttaaattatttttgaagctaagattagttttctttcttggctaattaggcatagaataaggaaataacagctttttatgttggaggaaaatatggatacagcctggcaaaaatttaaaaataatattccattacgtcgatttgtggtactgctattaattattgcctgcctttatgaaatacgagcaatgatgaacacagtattattaacttttatttttacttatgtgatcgtgcatttaattcatctagtgcagcggtattttcctaaaataccaacaggcctaattgttgcggtaacatatctaattatcttggcgctactttatttcgtggttaccatttatttgcccatgttagttggccaaatatctaaaatggtaaagtcagtgatggcgttttatgaatcaaatgaatcatcgcgcttagccagccatgtaacgcgttatatcagtaaaggtgagattgttacgcaggcaaaacgagttgggacttttgctctgcatacggtgaccaattttggtagtttaacaattgctacctttatgtcattgattttgagtttcttctatacgattgaattagatagaatgattgaattttcaaagttatttgttaaaagtggttactttaaatggctttttgaggatattcgctattttggtaaaaagtttaccaatacttttggtgtcgttttagaggcgcaattctttattgccatttgtaatacggccttgacgatgattggtctggcatttatgcatatgccgcaaattattgccttaggcttaatggtctttattttaagtttagtgccagtagctggtgtgatcatttctttaattccattaagtattatcggctattctgttggtggcattcgttatgtgatttatatcttcattatgatcatgattattcatgcaattgaggcctatgtgttgaatcccaaatttatggctagcaagactgaagtaccaattttctatacttttttagttttgttagtagctgaacacttctggggtacttggggcttgattgttggtgtaccgatcttcactttcttgcttgatgtcttagggattaaatcggcgaagaaaagtaaaaagaaagcgaataaataatgagagtacttttgacaggtgatagcattattgcacgccaggaaggaaaaaatgaaccgcatcttaattggaatttgcaccaattattgccagatattgaaatagaaaataccgctgtttcggggattaactccggggccttttttgccaaattaaatgaattagtactaagcgtaaagcagtgcgataatttggtgatcttgctgggaaccaatgatttggctatgcacaaacaagtgccagcaaggcaatttaagcaaaatatggaaattatttcctcggcaataatttgtcaatattacccaccacatgttctgcttgtttcgccgccagctgttgatgaagctaagcaacgtgtacggaataatacgttagtagcggaatatgctcagatcgtgaaagaagtagcacatgagtatcattttcgttatgcagatctggcacaagctatgcgggatactggcgatttaagcgagatttgtcaaggagtaaaaaacgatggacttcattttggtgatcgtggctatgagattttaggaaaactaattgctgaaaatttgaaacaaatgtaaaaaggaccgcaatttgcggtcctttatttttcgctattttaatgttgcccaaagcaagcttccagctagcgcaatggccaagaacggaatgagcaaataggcaaaaaagaaaaacataattcctacgactagtaaaaagccgataattttaatgaggccaattcctaatttaaagaatagccagagtaagagtaatgttaataataaagaaagcatattaatacctccataaatctatgagagtattttactaccaaattggacgaatagaatagtaggaagattaatgctttagaaaaatttagttaccggtaacaagataaattatattgaaagctctttctgtaaccgctatattttaactattgaaagcgatttaagaaacgagaggaaaaataaatggaggagaaaaaaactgggttacctacgctagctagtacgacaatttggatgattagtttggggtatttgggtgtgcaaatcgcctttactttggaaacatcacagatgagtcgaatcttccaaacattgggtgctgatccgacaaaattaggctggttctttattttaccgccgttagctggattggtagtgcaacctggaattggatcattatccgatcgaacttggattcctaagattggacggcgtttgccatatttattagtcggtatgatctttgccgtaattactatgattttgttaccaaatgttggtagttttggtctaggctatggttcaattgaggctctaatatttggtgctgttgcaatcgcgatattagacgtggcatcgaacatggcaatgcaaccatttaaaatgatgattggtgacatggtcaatgatgaacaaaagtcatatgcctatgggattcaaagcatgttgtccaactttggtgctgttattgccgcatttttcccgttcttattaactagtttgggtgttgctaatactgctaaaaagggtgtggtaccacaatcagtaattatttcattttatgttggtgctgccgttttagtcattacatcattgttcacgatattcagagtacatgaatatgatccagaaacctacgctcgttatcatggaattaaagaatctgataatcaagaaggcggtggttggattgaactgcttaagaaggcgccaaaagtcttctggcaagtgtcattagttcagttcttctgctggatttctttccaatatttatcaacttacgctactggtgctattgcacaaaatgtttggaatacgaccaatgcctcctctgcaggctaccagattgctggtaactggtttggtgttttaactgctgtacaatcaattgcggcagtagtttggtcatatgttttagcgaaggttccaaataatcaccacaagctaggttacggtatcagtttgctactaggtggagtaggatatacttcaatcttcttgattcattctcaggggtttttaattctatccttcattttaattggtatcagttgggctggtatgaatacttatccattgacgatggtatctaatgctttatcaggtaaacacatgggaacatacttaggattgttcaattgctcaatctgcttacctcaaattgtagcatcactgctcagcttcatgattttcccaatggtgggtaactccatgccagcaatgatgttgattactggtatttcaggcttcttaggcgctttatcagttttagcaattaaggaaacctacgtaaaatagcataatttttccgataaaaaaacactgcgtgcattgtcaatgtcattaagttaagctattgacattggagaaaaaacaattaaagcatcatttggctttagatagccaatttgatgcttttttgtgtacgccaaataagcgtagtttgtatttcttttttattaggccacgcgatacatgtaatatactgcagacttggcttttaaatttcgtttgtcttttcgcctttatttttgcaaaaaaaagaatcgaatccaaatgattcaattcctaaaaagatcagttttcaaaagtcaatagcttaacttaatgacattgcattttgaataactgcggagatttttggtataagtcccttaacgatgacctcggctcttattataataagaaaatccgcaaattcacagtgttcatattatagctgtcgttcactcttaacttataatcctaaaataacgttctaatctgtgaagtattgcagaatatcctcctcagttaggcgttttttgtcgtcgcctttgacatcaaaaacgattctaccattgtttaaaatgatagtgcggtttccgtatttgattgcgtcttttaattggtgagtgatcatgacacaggttaaatgctcttcttgcacaactttatcagttagttcaagcaattcgcggctagtatttggatctaacgccgcagtatgctcatctagtaagagtaaatcagggcgcttaattgtcgccattaaaaaacttaatgtttgtcgctgaccaccagaaagattacccacaaaagtatttaagcgttcatttaacccattagggagttgggccgcctggcgtttaaattcttgcatatgtttatctaggcctcttaaacgcagaccgcggtgttcacctcgtttggttgcaagtaataggttttctgcaacagtcattcgcggagctgtacccattttaggatcttggaatacttgggcaatatatttagcgcgttttacttcagaaagattggttaaatcttggtctttgagcagaatttttccgctagtaggaaaaatagagccattgataatatttagtagcgttgatttaccagcaccgttggttcctaaaagagtaacaaaatctccatcttcaagttttaaattgatgtttttgaggatttgcttttcctcattggtaccagcattaacagtagtagtaatattttgtaaatcaagaatagtactcatggtttttcaacgcctttctttaataacttacgagtgcggaatttttgttcaaataatggaagcatcatgcaaatagcaagaataatagcggaaatcaatttaaagtcgttggtactaaagccaagttggaggactaggagtaagataaggcgataaataatactgccgataacaactgctaccaagcgggcggttaaacttaaattaccataaacgacttcaccaataatgatggcagctagtccgataaccatagtaccaatacccatattaacgtcagcgtaaccaccgttttgggctaataatccaccagctaagccgatcaagccattagaaagcattagacctaagattttcatattatcggtattgatcccaagagattgggccattttttcgttgtcaccagtggcaataaaggcttgaccaagatcagtatcaaggaaaactgctagcaaaacgatgacgataatggcaatgatcaaaccaacaacaatagtaggaaaattgatcggtaatttttgtaaaagctgaccgtttagtaaagtatttttgttaagtaaaccaacattagccttgcctagaattctaagattaactgagtagacgccagtcatcgttaaaataccagctaaaagaacaggaatttttcctttagtatatagtaagccggttactaagccagtgaccatgccagcgaagaaggaaagaatggtagctgctaaaggattgacgccatgaactaaagcactaacacaaattgcggcaccgaaggggaaggttccttcaacagtcatgtctgggaaatttaaaattctaaaagttaggtagaggcctaaggctaaaataccccagagtaagccttggccaatagaagaagtaattaagctcatttgataattcgtcctttcttttgggcagcttgaattacactgttaggaatagtgatgtttaattcatgtgctgctttttcattgattactgtttcataatgggttacgcgtctgactggaagagcagcagggtttttaccatgtaaaatttgtcctgccatttgtccagttaagattcccatgtcgaattgactgacacacctggtagcgagaccaccacttttaaccatagtatcggcagcaggaaaaactgggatcttggcactgttagtagcctttaataaggtggcaattccactagctacagtattgtcggttgggacataaactgcttgaaccttgcctaccatggtttgggcaacttgttcgatatcattggttgaagtgatagtgtaagggataactttaagtcctgttgcttcagctagtcgtctgaattcacggtactctgatgctgatgaatcatcacttgaggtgtaaatgacaccgatgtttttggctttaggtagaatttcttgcattaaggccagctggctggcgattggctggcggtcctggacaccggtaattttaccgccgggatgcgctaggctttttactaaatgggccccaagaggatcgctgaccgcgcccataactacagggatgttgccagaagtattagctagagattggacagcaggagtggcaattccaatagttacagtcgcattttcctggctaaaacgatcgctcattgatttcagattactttgatcaccttgggcattttgaaaatcaattttaagattttttcctttgacatagccttcatctttgagaccctgaataattcctcgatgaatctgatctagagcggggtggctcattgtttgcaagataccgacagttggcgttttcttttccgcatttttcttatttacttcactgacaaatgcaactgccagaaaagcaaaaagagcaataattgttccgattaaccttttcattctttttctccttcaaacaaaaaaggcacttccttttttcgggaaatgcctaaaacaaaacccgcacgttattttccgtgcgagcaatatttcttgaagattttaccagcacagatacgatcttaatgagtcgcatctgtacttcacgaacagaaacaactctagtgctggaattgccaacgattgattgctgtaaatttaatcatgataaaatcttcctttcgttcaaatttgttagctaaattttaagtaattatgagaaagatgtcaaatgattttttgttagatttatttagttttgaataatttttaaaatgctataataattattccggcaaccatcataaaaagaagggaggaattctcttgcgctatcaacaaataatttttgatgtagatgacacaattatcgattttgcggcaactgaagattttgctttacatagcttgtttaacgctcatcactggcctttatctgcggaattgcagcggcagtatcattcttataatcaaggactttggcgccaacttgaacaaggtgaactaacttatgaagagttaagtgaaatgacttttcatgattttattttggatcattttggcattgagattgatggcaagaaggcaatggatgaatatcgttcatactttggtgaagcacaccaattattgcctggggttgaagatacgttgaaatttgctaaaaagcagggctataagctgaccgttttgagcaatggtgaaaaatttatgcaaaatcaccggttggagcttgctggggtgaaaaaatattttgacttaattgttacgtcagaggaagcccattattctaagcctaatcttcatgcctttgactatttcttcagtcgaactgagatcggtcctagtgagacagtcttttttggggacggcctacaatctgatattttaggtgcagaaaaatatggctttgatagtatttggtacaatcatcgccatcgtaaaaataccttgcatttgcatcctaagtttgtagtagaaacttatccagaattggttaaattaatgcagaatgattttgagaagaagtactaatcattatactttttgctcttcaagaagatgccccaaccaatagttaataagctgacaaaaattattaaaatccaaaagccgttttcattttctttacctggtaagccgccgacattcatgccccaaatgccactgattaaagcgggaagagcaattaccagggcagctgaatctagatatttcattaaatgatttaggtgactgtccatcatggcggtaaagaggccgctaatggaattgagcaagtcagtgtaaacgtgaatcattttggtaattcgtttttgcttggtcatgatacttttgacgcgggcttgatttgctagcttgttttctactaaataattaccaaattcttctagactaggtgtttgatcatctaaggtatgctttaagtaaactagctggcgagttaaatctgttacttttttaattctttggtcttagttgttcttcttgcagcttgatctaaatggtcaattttttgtttaattgttactaattctgcatgaagatgcttgatttggatacacaggctttgaaaaattgtttcaataatattttcttgcggttttaattctgaaagacttcttgttgtgccaataaagagatgattttggtcaaaaattgtaaaaattggaattagctcttgttcaattggcaagtcattacttaatagatcgaaactcactaataagtgaccattttttagtttattagaatcaatagggataaaacgagcaacctcaatcgaggaattagggtaagtgaaaattgtaggatctagatcccattttttgattaaatgatcgatatcgttttgcgtcaattgatcttttaaaattatattctgactattagtaagcatatttgttcacctctgtttcttttttagtttaagattaacatgtaatgttttttagactgaattaagttgacttgaaaatatgtttttttaaaaaatatagaaaggtgagaatatggaattacattcacttactgatacttatactttgaacaacggcgtaaaaattcctgtaattggtttcggtacttggcaaacaccaagtggagaagttgcaagagaatctgttgaagccgcacttgaggcgggataccgtcacatagatactgctgcagcttacggcaatgaagaaagtgttggcgaagcaattaaacgtagtggcgttaaccgccatgaattatttgtaactactaaattgtggaattccgatcatggttatgacaagactaaaaaggcaattgatactagtctagaaaaattagatttagactatcttgatctttacttaatccattggcctaatcctgtagctatgcgtgacaactgggcagagcttaacgctgaaagttggcaggcgatggaagaagcagtgaaggctggcaagattcgcgcaattggtgtatccaactttagaaagcatcacctggatgaattaatgaagactgctgaaattaagccggtagttaaccaaagttacttgaatccgagtgatttgcaaccggaagtaacggccgcaagcaagggatatgatttgcttaatgaggcttacagtcctttgggtacaggtggtttattaggcaatgaggtagttaatgcagttgctgaaaactatggtaaatcaccagctcaaatcttgattcgctggtccttacaacatggctttttgccattgccgaagtcagttcatcctaagtatattgcggctaatggtgatgtctttgactttgagattagtccagaagacatgaagaagttagatggtttacgtggtgcaagtaagttggctaatgatccggatgaggttaacttttaatttaatttggaataaagaaaattgaattatcacaagaagtatcttatttttgaagtaagatacttttttattaggtgagacaatgaagaaaattacaacaggaattgtagctcacgttgacgcgggcaaaacgactctttctgaggctctgctgtacaaggcaggaaatttgcggacgctaggaagagtagacaatggggatgcttttttagatacagatcaattggagaaaaaacgtggcattaccattttttctcatgaagctaaattaacgactgatgatttagaaattacgttgttggacacaccgggacacgttgatttcagtgcacaaacagaagaaacgctgagtgtacttgattatgctatcttggttatttcaattacagatggtgtaactagttatactcgcactttgtggcatttgctcaagcgatatcaggtaccagtttttatttttgtgaataaggttgatgcgataggcgctgatcgagggatggcgttggttgatattcaaaagaacttaagtgagagttgcgttgatttttcgaagattgatgatgaattttatgaaaatgtggctgccacagatgatgccttgcttgagaagtatttggatagtggtgccatttatgatcaggacgtgcagaatgcaattgtgcagcggaaagtttttccaatttattttggttctgcgttgaaattaacgggaattacggaatttttagctggttttagtaaatggactaaggaaaaggaattctctgataagtttgcggcacggtgctttaagatttcgcatgatactaaaggtgaacgcttaacttggttgcgaattttgggtggtagcttaaaggcaaagactgagctagctggtgagaaaattaatcagctgcgtagttataatggtgaaaaatttgtaactattactgaagcagctgctggagagatcgttgctgcaacaggattgactaagacgtatccaggacaaggattcggcgtgggggatgcaccaactgcactgcttaagccagttttgacctataaagttaatccccaggataatgatcttcacgcttgcttaaaagctctgcaaaccttggaagatgaagatccacagctgcatgtgacttggtccgaacatttgcaagaaatccacgtgcaagtgatgggaaagattcaattagaaattttagaacagttaatgaaagaacgttttggtttgaatattgtttttgaacagggaagtattctttatcaagaaacaatcactaaaccaattgaagcagtaggccactttgaaccgctacgtcactacgcggaagttcatcttttactggagccactgccacgtaatagcggtattgtttttgaaaataaatgcagtttagaagttttgactaaaaattggcaacatcaaatcatgacggcattgaagtctaaagaacatcttggtgttttgacagcttcgccgattacagatatgaagattaccttgatcggtggtaaaggctcaattgtacattcggttggtggcgatttccgtgaagcaacttatcgtgcagtgcggcaaggtttaatggaaaaaaagatacgccaacaaactattttgctcgaaccgtggtatgatttccgcttagaaataggaaaagatcaggtagggcgtgctttaaatgatattcagcgcatgaatggaaaatttagtacgcctgaaaatattggtgaacgaacagtcatatccggttctgcaccggtagctgaaatgcaagattatgcgacagaagtgcgcaattatacgcatggtgaaggtaatcttgaatgcgtagtcagtggttatttgccttgtcacaatgcggcagaaattattgaggaaaagaattatgatcccgtttctgatctggagaatacgcctaactctgtcttttgttcacatggtgcaggtcacaccgtcacttgggataaggtgccagagactgcacaatatccttatacttatccattagattagcatgataccatgaattgtttatcttgttacatgtgaaacattaaaaatgcggcatagtgcttttcttattaaaaagtgcaacttgaaataagcgaaatatttgactagttatgaaagaaatttcattttattagcaaaatactgctagaaaatcgcttgcatagtaagataaaggtacgatagaaaggtgataaaacatgacacaaataccttttaaagctgtagcggttgatctagatggcacttttttgaccgaaaaaaagacttttgatcatgcgctatttgcaaaagttttacgaaaattgcaagctaatcaaataccgtttatctgtgcaacagggaaccaactaattcgttcgcatgaatattttgacgagtttactaatgaagtagattatgtgtctgaaaatggggcaattctagaagccgatggcaaagtatttaagcggattgcgattgactatgatactgcacaaaaattgttacattttattcaaacagaataccctgaagcaatcattatggttagcgcacagcatcattgctatattttgacgagtatggatcaagcggataaagacgacattagaatttattatcgtgatgttcaggaaatcgatcagtttactgacattgatccagccgatgcgatcttgaaggtttgtctgacagctgatgatgaactggcgcaggtgattcaggatcggtttaatgaaaaatatggtgactgtattcgcggcactagcagtggtaatatgacaatcgacttggtgcataaaggcattaataaggccaagggcgtagacgatatgcttaagcattatggcattgcgcaaaaagatttgattgcctttggcgatggcgaaaatgatattgatatgcttaaggcatgtggctatagttatgcgatgaaaaacgccaatgcgaaggctaaggcggtagcaaagtatgaagcgccaacgaatgatgaaaatggtgttttgaaagttttggctaagtatttagatattgattaatttaatacgcaaaaaagacttgagaagtaattttcccaagtcttttagtttgctttattaactgctctgaaaatattaagtccgctaattagaatgatgaatccacaagctaaaatcagaaccgtttcaccagagctgtctaacaaaattccggcaacaattgaactaatcggtccaccaatagaggtactggtacgaatagtagttagcactctgcctaatatttcatcgtccgcagtaatctgaatcaatgattctgccaaaatattgtgaatactcgtcattagcccaaataagaaaattagtcctgtgaatatcaaccaattgttactgaagaaaattatcaaaagtaatggtactgcactagctatccaagtaaaaccaattgtttttacccgtacggataatcttcctgcaatagttgcacctattacaaagccaatcataaaactgatatagaacatactgtatagtcccgcttgaccattttgttgagcaattcttggcaacagaatggccattgctggcgtcacaaaagaatacaggattgaggaccagaagtaatgacttaagaaataatttgttttaataaacttatagccattaagaatttgattgaggtattttgcctctgcttttttgactttaggtctatctttaatttcttttagggcgtaaaacagaaaaacaaaactgattaggctcagtagactgcagatcaacattacattagctgaaattaaaaaagttaataaaaatccagaaagagcagttcccgctacattcacaaactggtcgatgttgctaactttagaaattagattatttaattcttggtcatcagccgttgtttcttttaaaatagcccggtcagctggattaaaaaattcatcgcagacagatactattcctgcgcagattaatgccaaaatataacttttgctaagttggtaaactgcaattgttgtggcaaataggaaaacagtttgaacaagaattgaatagtaacttgtccttttgaatgaataatgatcgataatggggccgtagaatattgataaggcggcagtggtggaaaagatggcttccgcaattccgacgacaaaggaacttttggtggaagtttgcagccaccagataaagaccatgctgaagagggaattagctagtccgccaacggcacgcgagaaaaaatatgatttcttttttaacatttgaagggttcaccttactatcatttggtcaaaggtatcgtatccacaccatgaatatggatggtttctaataattttatctatttttttaaatacatatttagactcattaacaatgcttgctctgttttgaatttttgacggataaattggatcttcgaaagtgatcttgattttgtatttttctgtcatttcagtatgtaagataataattggaacttgcattttattgcttacccaagagctacctaatggcattgaaacacgtgctcctaataaatttacagtatgttgtggccctagtcccattgaaatttctggtggaattgctactactttgccttgtctgatgtcttttaacgcttttcttaatattaatgggtatggaacaccataactatcaacaagagactgtaaaatagtttgtgtaaggatgaatgattccttaaatttatttctttaaacattagaaaaaggagttcctttctcgtatgattggtttgaacaaaaaaacacatacagaaagaagaactccttcatgaatgattttaccaaagattttgctcaagctctattcaatccagacaaaataaatgatttattgcgcaaagagctacaacaggctgttaataacttgttagaagctgaattgactgcctttctgggctatgatccctatgccagaaatggctggaatactggcaactctagaaatggtgcttatttccgcaaagttgatacgcaatttggcccaattgaagtgcaagtgccccgggatcgcaacggtcaatttcatcagcacacgctgcctgactacaagcagcactcggatatcttggaaagcatgattatcaagctttactccaagggcgtgaccaccagggaaatagccgatctaattgaaaagatgtatggcagccattacagtccagctcaggtatcaaatatttccaagcagatgattccaaaggttgaggcttaccacaaacgcaagctaagcgacaagtttttctgcgtctatttggatgcgacataccttcctttgcgccgagaaacatttgagcgtgaagcagtctatattgccattggcatcaagcctaatgggcacaaggaggtcattgactactgcattgcgcctagcgagaacattgaagtctggacagatatgcttcaaaacatgaaatcccgaggcttaaagcaagttgagctttttctttctgatggtgttgttggcatgaaaacagccttggccaggacttatcctaaagctcattttcaacgctgtttggttcatgtcatgcgcaatatctgcgctaaagtacgcgtcgacgatcgtgaaaagatcatgaacgaattcaaacaggtgcatcaacagacaaacaaagaagaagccacagctgtcctgcatgacttctataccaaatggggcaaggtttacagccatgttatcagaagcttgaaagacatagaaccagatctgctggtcttttataactatcccaagcagatcagagcttcaatttattcgactaacatgattgaatcatttaacaatgtgatcaagcgcaaagctaagcctaaggcagagtttccaactgaacagtcgcttgatgcttttattggcattcaggcaatgagctacaatgaccgttatttcaatcgaattcataaaggctttggtcaggttcaggacaccttagaatcctactttgattaaataaataattaaaaaatcaatttacgagaaagaactatttacacaaaagatttgacagtttcagtgaatttatattatgggtgttctttataatattttttacaacagaatttatttcatttggatcaaaaatggacattgaaatagcaaatagtcttaagctattttccgtccaattatctgtttcgaatatagttttctttatgtattgtttttcatcattagaaatctgggctaaagtatttgaaattgctgcttttataataataatttgtgccctaatattatccaaatttagttcactattgtttctatcgtttagcattttttctaattctgttattttcgacaaatctttttgatagtaagctgtgtgtaataaattatcacaatcaattttagatatgtgatttttattagtattattttcaacctttttaaaaaaagaagagtaatcaatattatgcaaacttaaaatttgtaataaatcatttgctctaatactacaaatatcgcgttccactttagagtaaaatgatttagtgagtatgttgccagccattttactttgacttagatttaattgttttctttctaacttcaatgcctcgccaattttcattttctttcctccaatgtcggataatgactaaatcatcatttgctttctgatataaataaatttatgcaattgaaattttatgtcctgaaaagtatagggtaaattattcaagaataagatactaaatatttagtatcttattttgcatacaattaggctgaaaaaacacaaaatactaatgttataattgattttagaacttaacaagaaattagggaacttttatgaaccaattatatcaagaaattaatgatgctttatatcatgtatattacgggattcagcggattgaagaagaagaactaaagaaaagtcgtttcaatgatcttactcctaaggaattgcatgcagtagatgctattactatgtatgaacatcctactacttcgcaagtagcagaaaaattgcatttgtcacgagctacaatgactgtgactgtcgatcggctagttagaaaaggctatgttgaacgaatccgaggtaagcaagatcgtcgtattgttcatttaaaattgacaatgcgaggcagagtagtgtgccgagcatatcatgcttatcataatcgaatggttaaaagttttttgcaaaatctagatgagaatgaattgcaaacaatttatcatgcatttaaaaatctggatgagtttttgaactcacactaatattattttgaaattgcttaagcagactggagatattcagtctgtttttttgtggacgaaaaaaatttaattacatagaagtgttcttagtattagtgtaaatagaatttttgagttctatatgaacttgtaatgtgttgacaataaaaaaagagatgataagatttgaatatcgaatagttagatatactaattttaaaaaacgaacatggagatgaagttatgccaatgaatactgctgagattcaaagcaagttagattgtcaagctcccttgatgctgttagatcgagttacaactttgaataaagatcaacaagtaattgctcaaaagagtgtgagtgctaatgaatcttattttcaagggcactttcctgagaatccaataatgccaggtgtgctgctaattgaagccatggtggaggcaacacaatttatgtgggatcggtcagatttgattcttactagagttaaaagaggccgctttcgtgagatggtcaagccagggatgcagttgacaattaaggttaacgccattaaaaaatacgcatgtcaggcaaaggttttaattgatgataaagatgtttgtgtagcagacttggaatttaaggtaacagaagaaaattgaaagatgtaaaaattatagcaactggttttgctgtgcctgagcatgtcgttactaatgatgatctcagtaagatcttggatacttcagatgaatggattgttaaacgaacaggcattaaaaggcggcatattagtcaaaatgaaaatacttcggacttggcaactcgtgtagcaaaaacattattgagtcagagtaatgtaagaactcaagatattgatctgatagttgttgcgactatgacacctgataatatgacaccagctacggcagcgattgtccaaggcagaatcgctgccgaaaaggcggtatgttttgacatttcagcggcttgttcaggcttttcttatgctattagccttgctagaagcatgatgcttaccaataattggcgtcacgcaattgtaattggcgcggaggttttatctaaattgctagattggactgatcgctcaacggcagttttgtttggtgatggagctggtggcgttttattaagtcaaagtaatgccactcatttattgggacaaagtttaaaaacttatggtaataaaggtgatcaattaattgcaggtcatttagatgtttcttatgacattttgaaaaataaaaaaagctatcagcctttaccatgaatggacaagagatatatcgttttgctacgcatgaagtaccacggtcaattttgaaagcttgttcaaatgcacaaattgaacttgatcaaataaattattttcttttgcatcaagctaatagtcgaatcattactcaagttgctaaaaagttaaatcagcctttaagcaaatttggtgtaaatattgacgagtatggaaatacagcggctgctagtgaagcaattctgctggctgaaataattcagaaaaacagaattaagccaggcgaaatcattgctttaagtggctttggtggtggcttaacaacggctacattgattattaagtattaatacgaggagaataaaaaatgactaaaaaagaaattttaaaagatgtacaagaaattgcccaagatgaattagatgttgaaccggaaaaaatcacaatgactaccaacatcaaagaggatttagacgccgatagtctagacctttttgaaattttgaatgagttagaagataaatacgatcttgatttagatgctgatgagagcatccaaacaattggccaattagttgattttgtacaagcagaaatggataagcaaaaataatgagttacggtattctgtttagcggccaaggcgcgcaaaaagcgggaatgggacttgattttttagacgatgatctatttaaagaaacgattgaaaaagcaagtttagctagtcaggaagatttggttgccattcttagagatgaaaatggagaactagataaaacaattaatgttcaacctgctctagtagcctttgaaataggaatttttcgtatgcttaaaagagactgtccccatctaaatattagtagaatggttggtctgtctttaggcgaatatagcgcaatgtatgccagtggtagtctagatttagaaaataccctgagcttagtcagtgatcgggctcgttatatgcaagaagatgctgatcagattgaaaacggaatggcggctattttaaaacctaaactcaatgatattgaagttttaattcaaggcctgcaaaagcaaaacaaacgagtttatattgctaactacaattcgcctaaacaagtagttattgcaggtgaaaaatgtagcgttgcattagcttctaagcaaattaaagatcaagatttggctaagcgaattattatgctaaaagttaacggcgcctttcatacaccactatttaataatgcaaaaactaaaatgacgaagcgattagcaaatataaagtttcaagaaagtaaaactccggttatatctaatacaactgctctgccttttagtggaaattggcgtgagattatggctaagcaattaacagtccctacgcattttggctcatgtattcaatatttagttgaacatgagcaaattgatcaaactttagagattggtccaggcaaggtgttatcttcatttgctagacaagtagatcgtcacttaaagtgtagccatattggcaattatgcagaatatcagacttttgtagaggaagaacatggaattaaaggataaagttgtttttattacaggctcaactcaagggatcggcgcagcaatggcagttgcatttgccaggcaaggcgccaagcttattgtgaatgggcgaaaacaagagttgcctaaagatttaaaggatgcattggataaagagaatgctgattatcggtatttatcagcagatttagcacaggacaatttagaggagataggcaaaacagcctggaatttatttggtaagatagatgtcttgataaataatgcaggtcaagcaaaagataaaatgttcattggtatgcatgatgctgatttcgaagaggtattaaatttagatttgaaagtaccttttttcttgagtaaagcaattatgaaaaggatgaataaagagcgttccggggtcatcatcaatttatctagtgtagttggcttacatggcaatgtgggtcaagcaaattatgcagctgctaaggctggtctaattggttttacaaaatcaattgcacgtgagggagcgttaagaaatattcgagttaatgcgattgcaccaggaatgatagatactgaaatgacacaaaaattgtctgaacgtgttaagaaaaatattttggaacagatacctttaaaacgtttaggttcaactaatgaagttgctcaaggagcggttttcttagtgcaaaatgattatgtgacaggacagacaattgtaattgatggtggaatgaccatttaaagaggcaatatgcaaagagtagtaattacaggaatgggggccattgcccctaatggtaatggtgttgaaaattttgttcagaatactttagcaggcaaagttggcataaaaccaattacgaagtttgatgcatctgaaacaggaattagtgtagccggcgaaattgatgattatgacgaaaatgattatgttggcaaaagagaagcaagaagactagatttgtattctcaatatgctattcaagttgctaatgaagcgatggaaatggcagggattgatgaaaaaaatactgccccggaagatttaggcgtgatttttggatccggaattggtggattgactactattcaagagcaagtaattcgcatgcatgataagggacctaaaagagtatcaccactatttattccgatggtaattgctaatatggcagctggaaatatctctatccgttttaatgctaagaatatttcaacttcaattgtgactgcttgtgcttcaggaactaattcaattggtgaagcttatcgtcgaattaaagaaggtgatgcacaggtaataattactggtggatcagaggctactattaatgaaacagcaattgctggtttcgcagccttaacagctttatctactagtacggatcctgatcgagcatcactaccatttgatcaaaaccggaatggttttgtgatgggggaaggagctggagcactagttattgaaagtttagaacatgctcaaaatcacggtgccaaaattttaggcgaaattgttggctatggcacgactagtgatgcctatcatattacttctcctgatcctaaaggagttgaagcagctcgttcaatgaatcaagcaattgtacaggcaaatattgatcctagtcaagttggatatgttaatgcacatggtacagctacacatgctaatgatgctggagaaagcaaagcgattaaccaagtttttggaaaagatagttcagttttagttagttcaactaaaggaatgacaggtcatttattaggagctgcaggtgccattgaagctgtaattactgttgccagcttagaaaaaggaatcttaccaccaaatgttggttgttttaagcaagatccagaatgtgaagttaatctagttaataaagataatcaacagcaagatattgagtacgcaatttctaattcttttgggttcggtggacataatgccgttttagcttttaagaaatggagcgagaattaatggacttagaaaaaatacaagctttaatgaatcaatttgaagattcagatttacgtgaattgaaaattgatgatggtgatttccatttctatttaagtaaaaacaagaataaagttactcagacagtacagccgactgttcaaaagaccgctaaaaaagtggaagaaacagctcaacctgttgttcaagagaatattgacaccaaggttaaaccggttaaagcacctatcgttggagttgtttatttgcaggctaaacctggacaaccagcctttattaatgtgggcgatcatgttaagaaaggcgacacaatttgcgtgattgaggcgatgaaaatgatgacggaagttaaaagcactttaaccgggactgttagtgagataaaagttgaaaatgaagacctggtcgaagtagggcaacctttaattactgttaaggaagattaatttatgagtaaagaactagggattgacgaaattaaacaaattattcctcatcgttttcctatgctgttaatagatcgcgtcttgtttctaaaagttggtcaggaagctaaagcagttcataatgttagttttggtgaaagctttgttcaagcaagttcctctaaagatccagtttttccttctattttaattgttgaagccatggctcaaacaggtgcagttgcattattgagcaaggcagattttgccggcaaaaccgcgtattttggtggaattaaggaagcaaatttcattgttcaagcaaggccaggggatcagatagttttgacaacaaagttaactaaaatcagaaaaaatattggcattggcataggtgaagcgtgggtaggcaataagaaaattgcacaagcagaactaacgtttatgattggttaggtaaaatgaatgtttaaaaaagttttaatagcaaatcgtggtgaaattgctgtccgtattattcgttctttgaaggaaatggggattaaaacggttgccatttattcaactgcagatcgagaaagcttacatgttcaattagctgatgaagctgtttgcgttggtggcccgcaacctactgagtcatatttaaatattaaaaatattttagcagcagccgtaggcatcggggcacaagctattcatccgggatatggttttttatctgaaaatgcagaatttgctcaaatgtgtgaagattgtggcttaacttttatcggccccaaggcggaaacgattgatcaaatgggcaataaggaacatgcgcgtcaattgatgatggcacacaatgttcctgtaactccaggatctaatggagttattaaaaatgctgaagaagctaaaaaaattgctgctcaaattggttatccagttttgattaaagcaacagctggcggtggaggcaaaggaattagacaagtaactgatccaagtcaaatggccgaagctttagcggctgctcaaagtgaagctaaaaatgattttggagatgatcgaatgtatctcgaaaaggtaatgcaaaatgtaaagcatattgaggtgcagatttttcgtgatatgtacggtcatacggtttatttccctgagcgtgactgctctttacaacgaaataagcaaaaagttttagaggaaagtccttgcgatttaattacggaaaatgaacgtaaagaattgggtgaggttgcggttaaagctgcccgagccgcaaattatgttaataccggtacaattgaatttttgatggatcaagatcatcatttttattttatggaaatgaatacgcgtattcaggtagagcatactgtaactgaaatggtaaccggtgttgatttagttaaagcacaaattcaggttgcgaatggaggaccactgccttttacgcaaaaagatttacgggctaaaggtcatgcaattgaatgtcgaattaatgcagaggatccagcaaataattttatgccatcaattggtaaagtttcgtacttatatttaccagttggcaatccggggatgcgcattgataccgccttatatcagggacaacaaatttctccttactatgattctatgttagctaaggtagttgctttgggcaatacacggaaagaagcgattgctaagatgaaacgcttacttgaagaaatagttctgcaaggtattactaccaatcaagaatttcatttaaatatactaaatgatccaacttttattaaaggtgactttaacaatacttaccttgaacaaggctttatgccgcaatggaggagtgaaataaatgaaactatttccgcataaaaatactcctactgatacacatattaaagcaaataaagcggctgatgatcgagtacctgatggactgctgcgcaagtgccccaaatgccatcatgaaatatttgcgaacgaattaaataaattctatgaatgtccatattgtttttacggctttagaatctctgccaaaaaaagattatcgtggttagttgatcaagtacaggaatgggataaggatattgagtcctcgaatcctttaaaattccccgattatcaaaagaagatcaaacatgctcaaaaaattagcggcttaaaagaatcagtttggacaggcttagctaagattaaccaaacgcaattcgccttggctattatggatccaacttttattatgggatcgcttggtcaaatgactggtgaaaaattaacgcgtttgtttgaaaaagcaacgcttcagcatttaccagtcgtactgtttgcggcttctggcggagcaagaatgcaagaagggattcttgctttaatgcaaatgggcaaggtatctaatgcagtagctaggcatagtcaagcaggtcttttttatttagtagttttaacagatcctactactggtggggtgacggccagttttgctagtcaaggagatattattatagctgaaccacatgctatagtgggttttgctggtaaaagagtaatcgaacagactattcatgaaaaagtagcggcagatttacaagatgcagagaacgttttgaatcatggttttattgaccatattgttagacgctcacaggaaaaaagaatcattgaatggttaatcaaggtaggtggctatcatgactaaaaatgcaattgatatagttaaagctgcaagagatgaaagtcatatctctggtcatgagatacgcaaacttctttttcccgatttttttgaattgcatggtgatcggtgtggtactgatgatcctgctatagtaggtgggctagctacttttaatcaagagccagtaacagtaattacaactagcagaggacatttacttaaagaaagaattcaaaaacactttgggcagcctgaaccaggtggttatcgtaaagttctgcgtttaatccaagatgcaggtaagtttaggcgacctgtttttttgtttgttgatacagctggcgcttatcctggtaaaagtgcggaagaaaacggccaaggacaggcaattgcacaaaatttgcttaaagttagtcaaatacctactcctattattacggtcatgtatggagaaggcggctctggtggtgctttagcgcttgcctgcggagatgaagtttggatgttggaaaatagtatttattctgttttatcgccagagggctttgcttctattttgtggaaagatgtaaaaagagcaagtgaagcggcggaagtcatgaaattgacgcccgatgatttactcaagatgaatgtgatcgaaggtatcatcgccgaaccggataatcatcaagaggtttgtcaaaatatagcagaaaagctgcaaagtgagataaacaaattaagtaaattatccgaggcagaattgcttgctaagcgatacgaaaggtttagaaagttttagaggtaaaaaatgagtggatttttagcaggaaagaaaatcttggtaatgggtgttgccaataatcggtctattgcatggggatgcgctcaagcaatggaaaaacagggagcaaaaatcatttatacttaccaaaatgagcgattaaagaaatttattagcaaattagttactgatgaagattgcctgattgaatgcgatgtggcaagtgatgagagtattggacaggcttttggtttgattcaatctcgttttggcaaaattgatggcattgttcacgcgattgcatttgctgagaaagaagaattaggtggctcaattttaaattccacaagagagggattcagccaagcagttgatatttcagcttattctttcttggctgctgcaaaagctggaatcaaaatcttaaataatcctgcaagccttgttactttaacctatatgggatcagaacgtgccttgcctaattacaatactatggggattgctaaggccgctttggaatcggaaatgcggtacttagcgcgagacctgggtgaaaaaggtgttcgggtaaatgctatttcagcaggagctatgcgcactctggctgtctcaggaatccagggtcatgcatcattattgaagatttctaagagtaagactgttgatggtgttaatgtgacacaagaagaggtaggtaatacctgtgcttttttgatgagcgatttggctagtgggattactggagatgtaatttttgtagacaaaggtgtacatttacgctaatgcaaatttacaaatatcgaaaggttacttcaacacaagatcttgcaaaaaaatatttagcaaataaagctcaagaaattgctgcatttatagcacaggaacagacggcaggttatggcaagaggggacgctccttttattcaccagctaaaacaggtatttatttaagtattgcgcttcctaattttaagtttaaattagagcatgcaggcttattaacaatagctattggggtagcggtagttcatatactacaagaacaatttccttcgtatgaatttcgtttaaaatgggttaatgacatttatttaaatgataaaaaagtagctggtattctaaccgaaaaaataggattaggtttggtaataggaataggggtgaatatttttacggcatctttcccaaaaaatatctcaaatcatgtcggcagtattgtacaagctgattatgcttttgagaatatgaatgagcagttaattcgagctgttgtgcaggctgctaatacatatcaaaataataaatttttagacgagtatcgcaaaatttcttatctgaaaagtaaagttataactttgaaaataaatcattattatgtaacaggtcgagtagtgacaattgatgatcaaggacggttagttattagttgtcgaaattctacacgttgctattcaagtggtgaagttattaaggtggaattagaacccggatttaagggtaaacagtaaaatagtacaaaaaaagacttgagaagtaatttttctcaagtcttttagtttgtcttaatttaggttaattaaaacttgttcttgtccaaagcaactggagaatctggcttttcaccattgatcatcttcaagttgttgtcaaatgccttaacaaccatgttacgtacagcgtgggtggtgtagaaggcggtgtgtggagttaccaaaacgtttggacgatcaattaagtcagctaaacgcttgtctgggaattctttaccttcccaatcttcgttaaatacaccaacttcgtcttcgtaagtatccataacaaagccaaagatcttacctgagtccaaaccgcggataacagcgtcagtgtcaacaagtggaccacgtgagcagtttacaattacaacgccatctttcatcttggcaattgattcgtaattgatcatgtgtacatttgctggaacatctggtacgtgaagtgaaattacatcagcttgcttgtacaagtcgtcaagtgagtcaacgtagtaacccttcttttcgagttctgggttcttgaagatatcgtaagcaatgacctttgcgccgaaaccttccataattctcataaatacttgaccaatgtgaccagtacctacaacaccaacaacttggtcacgaacttcacgaccaatagtaggtgcccaacgtaagtcgcgcttagccatcttttcgtccatacgcttgtcttgacgtaatacacgagcagcttggattgcagcatgttcagcaatagcgtcaggagagtatacaggaacgttagtaatttcaaagccaagttccttagccttgtccatgtcgatgttgtcgacaccaacgttacgtaatgacatcttagttacgccagcgtctgccaatgcttgaagagtttctggggtgtagtctaattgttggtaaacaacaacaccgtcagcacccttagctaacttagcagtttcaggagtcaaaagcttatcagtgtaatctacatcgatatccttgtgagcatccttccattcgtttaagaatggttcttcgtctttacgaatagcgtaagcaaaaatctttgtcataaatttaacctccgtaaaatttattagtatgaccagtcctcattatacgcttttacttgctcaacaaaacacaaaagaaccatttttttgtatagattttaagaaaaataaaagtcaagttttactctgagcaaaaaagttgcaattttttcaaaaaaagtttatagcctaaaaattgcaactattattaactgttacctaatctcaatcccatagatatgaaaattatttttgtatatagcaatattagttaaaggtagtatatggatttgtataagagacgcattttcgttatataacccaggttatataatggactttaagtagagaaacaaacatagcggaggaaaattgaatatgcattttaaaggagaaagccaacagcatttcagcctaagaaagctgacaattggtgttgcttctgtaataatcgggaccacctttatgttttttggtggtcatgctgttcatgcagatgatttaagtagagatgctgagcaaaccagctcagttgttcaaaaacagagtagtgagaaaatagatgtagatgcagtcaaagaagctgataatgtttcaaatcaaagacaagacttacccagacggtactaagagtaccgcaactgttcctgtaactgtcattgcaccaaatgtaccagacgttatctacgtaccaaagggtgacaagtttccagacccaagtactgtagttactaactctaacgatatcaaggacaagattcctgacacgacttacacttggaaaactactccagatactccaaatactaaagtagtaattaactataaggctaataatcctggtactccagataccccagttactccaccagtggatccaggcgataatccagcaaccccagttaccccgcctgtaaagccagagcagaagccaacaacaccaactcctcatgctactaagacaccagcaaaggataatggtggcaagaagacagtagctagtgagcaaaaatctactttgccacaaacggggaagaaggataacgttgctttgactgctatcggtgtagctattgcagctgctggaagcttattaggattagcagatagcaagaagcatagatcttaatttgtaatatctaatttctgtttactaagaagcaagttgactcagataggagctagcttgcttttttgtctaaaagtttaaggatttctaaagacaaaaagcaaatagtgacgcattgtcataaagctgatattatatactcataacaaaaatacaacgcatcaaatagagatgaattgtaagaaggtaacaaatcttctaattccttattaatacatcctattgggcctttattaattcatacattgggtattgctttttgctggttgtcccctatgcaaccgcgaaagttaagattgataataagtccatcccctttttgcgaaggtaaagagtcaagaccccctgcaacatctcttgcgttgaatcttttgttaatcttgataatttatcttcgcaacattagtgatgagtaggctaatgtaaaaaaatctcgttattctcattcaacacaactcccttaaaagggctggtttagaaaagtcatctaaatcagtcctttttctttttttcgttataattaaacttgagaactaaaacaaaggggaagaaaaatgatcttaatttcatggaatatcgattcattaaatgcagctctgactggtacttcagctagggcggaagaaacgcggcaagttttaactaaaattcatgatgccaatccagatattattgcgattcaagaaactaagctgcgtgcaactgggccaactaaaaaacataaagaagtgttggctgaaaagttccctgagtatgactatgtttggcgctcttcagaagaaccagctagaaaaggctatgctggtacaatgtatctttataagaaaggattaactcctgcagtgtctgagccgattattggcgcccctgagccgatggatcatgagggacggataatcacactggaatttgataaatgctttgtcacccaggtttatacgccaaattcaggcagtggtttaaagcgactagctgaacgtcaagtttgggaccaaaagtatattgaatatctgcaaaaattagatgaaaaaaagccagttttagctagtggtgattacaactgtgctcataccgagattgacttgaagcatcccgaaaataatcatcactcagcaggttttactgatgaagaaagagtcgactttaccaatttgctcaatgctggctttaccgatacctttagaaaagttcatggtgagattactggcgtatattcttggtgggctcaacgtgtcagaaccgctaaggctaacaactctggctggagaattgattactggctagtaagcaatcgcattgctgataaggtggtccgctcagagatgatcgatacaggcaaacgagcagaccactgcccaattttgcttgaaataaatctttaaattgaagcaagccctagtataatttctttttgaaatgtttttattttgaaaaagaagtaggggttgaaattctttgaataacgagaaaaaagaagattgggctttggagcaggatctgaagtacaatcgtctgacagcatttaagctattcgcgatgactagttcaatggttatttccgttgatgaactcgcaccatttggtaaaactggagcaacggcactgttttacttgttaattgctggaatcgcttggtttatcccgattacgcaaatggctggagaaatggcctcaattgatggctgggaaaaaggcggaatcttcacttgggtgaaaggatctcttggagacaaaacaggctggacagcaatgttttatcaatggattcatattactgttggtatggatacgatgatgtatgtgatcattggggcattgtctatcacatttgggacaccttggttcaacaccacgccaatcgtacgcttcattttaatgatggttattctgtggggagcaacagcgattcaggtaattggtgttagaaagattggtcgaatcgctgaatggctgtttattctggggattgcgacaccagtaattttattgattatttcattcttcgtatatgtgattcaggggcatcccttgcatatgacgattaactggaatactgtaattccacataaattgaatggtaatacattagttgcctttgtcccatttatgttggccttttgtggtggggaagcttctgcaccgcacgttaaaaacttggaccacatcaagtcatactcaaaagttatgcttggcttagccgttactgcaatctgcttcgacttgctaggtagtatggcaattggaatgactgtgcctaaggatcaaatagagaacagtacaggctttgtttatacctatggcaagctgttaacgtcaatcgggctacctggtgatctgttgcaaaaaattgtgggtataatgttagcctgcggtattattggtgagctaggcaactggattgctggtcctaatcagggaatgtatgaagcggctaaagagggctatatgcctaagttttttgctaaaaccactaagcacggcgtgccattaagaattatggttttacaatcaagtatcgttaccatttctgcattattgattacttttaccagtggtgccgatgcagattttgcgtttaacgtttcattggccgcaacgacggcgcaatatctcatggtttatatgattatgttgattgcttacatggttttgaaaagaaagcatgaagattatcaccgtatgtattacatgagcaagaaccctaatttgagtattgcaattgcggtgcttgcattaatcatcacggttatagctttctttgtaacttttgttccagcacaaggcacgccaagcaatttgcgtcacgtttatgtttggaccttaatcggcatgtgtgccattgtgtcgattttgccacttattttgtatcgctggcatgaaaaatggcaatcacaatagaattaagaagcattcgtttttcaagacggatgcttttttagtagaatttgagagaggtgaataaaatggcggatgcgatgagggatgcaatattaaatggttttgttgatcaaaattatttaggaagtgaagaattaggtcctaaaatattagctaataatcagcaagagagaatctggcagaatttgcgccaggaattgtatagttgcaagtcctttacttgggcggttgcgtttattacgcaagacatgctagttccgtttaaggtgataatggcagatttagcgaaaaatggaattagtggcacgattattactggtgattacttgggttttaacaatccgcgtgtttttacggaattacaaaagattcctaatttagaagttcgtattgctaataaggcaggtttccatactaaaggatatttatttgatcatgaaaactatcaaactgtgattattggcagtgctaattttacacgttcagctctgctggctaactatgagtgggctttgaaagtaagttcaaaaaagcaagcagatttaacagctcaattagtggataaaattgcagatttgaaacaggatagttttgttttaaattcagcctggctaacagattatcgtaaaaattgggtaaagcctgagcgagttgctactgatcggcatcagacaaaaattttaccaaataaaatgcaaaaagcggctttaaaacagatagaagcactagttacaagtggtgaaaaacgagggctagtagtgtcagccacaggaacggggaaaacttatttaggtgcttttgctgttaagaaatatcagccgcggcgttttttatacattgtgcatcgtgagcaaattgctaaaaagtcattagaaagtttttatcgtgtaatcggtggaccaagatcggattatggcttattaacgggaaataggcacaatttacaggccaagtatttatttgcgacggtacaaacgataagtcaacctgagatgctggctaattttaatagcgatgaatttgattatatcttgattgatgaagcacacagggcagctgcaccttcatatcagcgccttttacattattttaagcccaatttttggttaggaatgacggctacgcctgaacgaatggatgagcaaaatgtttaccagatttttgactacaatttggcatatgaaattcgtttgcgggatgcactggaagagaagatgctggcgccatttcattatgtgggtgtccaggattatgaagcagacggagtagtgattgatgaaacaacagatttacgctacctagcttctacatctcgagtagactatgttttaaaggaattagactattacggctattgtggaacaaaggctaaaggcttggttttctgcagtcgacaggatgaagcacgtgaattagctcggctttttagtcaaaaaggacatcccgctgtagcattgaccaatgaggataatgaaaaaagacgtaatgaagtggttgcgtctttagttaaaggtgagattgagtatattgtagcggttgacttgtttaacgaaggaatcgacatccctgccttgaatcaaattgtgatgttacgcaacacacagtcgagcatagtgtttatccagcagttaggccgggggcttcgtaaatatcctggcaaagattttaccgttgtgctagattttatcggcaattataaaaacaattacatgattccgttggcactgaatcaggatacttctcgaagcaaagatcaagctaaacgagaaacgcgtctgccaagctttattgatgtttcaacgattaactttagtaaaattgccagtgaaaaaattttggcttcgcttgatagtgtcaagcttgatgggatgcgtgaattgcggcagagttaccatgatctcaagaacaaactagggcgtgtaccgctactatttgatttttatcaatatggctcagttgcaccgattgtttttgcacaaaatcatggcttggcaagctatgctgactttttgggtaaaatgggcgaagacgttaatttatcaaaatatgaaaatgaagtgctgtcttttgtgactaaggaattacttaatggtaaaagaattcacgagttacttttgttagagatgctacttgaacaagatattgttaagcaagaagattatctagctcaattgaaacgacaccatgcttatgtaaatgatgaattgttagcttctgttgatgcgattttatcgctagatttttttgatattaagcagggaaagactaccaaaaaagcacaatatggtaaattgccgttagttgaacgtagcaatttatttgactatcaattgaatggttctctacgctctgccctagatcaacatgattttaagaatttatttgttgatgctattaaaactggtttggccttaaatcaggaatatgataatcagcgtcaatttactttatatcagcaatatgatcgtaaggacgcttgtcgactcttgaactggcctaaggatgtttcggccccgatgtatggctatcgtgttggtgagcaggacacaccaatcttcatcacttatcataaagatgatcatgaaaagcggaatgctctgtatcgtaatacattggctgatgggcgcagtttgcgctggtatactcgggtaccacggcatttagattctgatgaggtacagcgtttgcttaatacgcgagggatgaatttgcatatatttgttaaaagaagcgatgcagatggtaagcagttcttttatttaggcaaggcaaagattcaagctgattctgttcgcgaagaattgctcggtgttaagaaaaagccagctgtagggatgaacttaatgttgaaacatccactgagtgagtcaatgcatgagttattatttgaatagaccaaaaaagcctttccgcttaggaaaagcttttttaattgccgctaatattaattagatcttggtcatcttggttattatccttatcaaacattctaggcttgatgtgatctagaatcttagtcccgatatttttctgagcagtttcatcaccgctaacctggtttaaaaacataattattccatatcgattatctgtagtcattttgatccaattaccaaaatgagtgttgcttaagctaccataagcagatttagtatggtcatcatctaaatgaagccctccagaataattagtggttgcacttttaagatgagttaagtaatagaaatcggatttgcttaagatactaccattggttaagccaagctggatcttgtaataatccattggggtagtgaacatattgcctgcgcctggaagctgggaggcaagagtctttttaacgtattcagcgtcttggtaatttttaccattattccagacgtaagagataggatcggttttccaactaggaatatcctgataaaggaatgtattagcaagccctaatttgttaatgatgcgattattgaaattgttttcgtaggattgtccgctgattttaataataattccggctaataaaagatagttggtattattgtagaagtaggttcctggtgtcccttgagtgccgttattagtattatcaatagcccaattgatggcgtcattctcacttaaaacttttccgcgatccaattcagtattggttgcttgaatgccagaagtatgggtcattaactgtccaatagtaatattatcggcgtttttaagattagggtaccaacgtgaaattttggtgttttgcgtaaatttttgactagtgtgccagttttcattcatcagctgaattatcattgctgctgtaacaactttttgcaaagaagcagttggataaactacgttgtcgttcccattaccaacttttttaccgtaccaagcgtagccatagctgatttgttgcggctgaccgtttttgataatgacgatactaccgcgagtattgttttgagccaaagtattgcggacaaaatttcgcatttcggttttaaagtatgaactggcttgaacttgtggtggttcagtgatcgcaaatgcaggaactgtcgttagcagcgcagcggtagctagtccaataattgattttttcaaaaattaaaaggcctcccttaaaaagtggtttgtttacattttagcgcgttctttgcatcggacaaactattatcttggtgaaaagacgtatttttagctagcttgttgaaaaagtgcggctaattttgctctgagtgcgggatcatgagcgtataaataggtaccgcggattcctcgcttgaatagaacgttgagtgaattcatgaccatcttctcttcatattctattttttcttttgagttggttagatcattacgctttttgaacatctcaacatctgtaattttgtctaaattaactttaagttgattggtgcggggaatcaggctgattggtggaccgataatgatgccagcataatttaggtcaaaaccttggcaagtatagatagaaccaacttcattgattgttgtaggaatttctgcccaaggagttgatgtgtagttgtattgatcccatggcagcataaatttcccttctttaatgtaatgtttgccaccatcaagagtagatggatagccggaagttgaaagaattcttgccaggccgtctgtttgatttctcttgacgatttcttgccgcattttttctgcatcagtaaaaatacgaaagtcgtagttgtgccacatttctttttttaagggcattaatttattatgtgtaaaaaagttaaaccattctattagactatctggtgccatcattctaaattgatgatgtagttgatagtcttcgtggggataatgatgagtaattgcttcaagtcgcttacgtgtccagaagcttttcattcgtaaaacttggttttcatcaaataccaaaatgataacttttgaccgcttaataacctcctctaattggttatcgtgataaaagttgttgtagtgatcaggctgagataagagcaagtgtgcttcatcaatgacgacaacatcagcactggtttgttttttgtccatctgattaataaatgaagttggccgcatataatttttcttatatagttctttaatcggcccagcaatctgcttatagacttttagcagttcagggtgatttactaaaaagtagttttgagttttatacagttggctgcctgtttggtggtttaatttttgcaactgatcaaaaagggcagaaagcactacacttttaccagtacctgcttcaccataaatagtgaaaacagcaggatgatttttattgctgcaatgtgtaatcgaaaaatgtaaaattttttgtacgagaagtgattgctcttggttgagctgatggtaaggagagagtttaaaacttgcttgattattcaatatttattcacctcgttttcaattataatgaatagaaataataatgataaaggaagaaaacatgactgcacaaaaaataattcacaatcggctatttttaagacaaaaatctgatttagctggcaaaaatgatttacaagttgcgataaacttgcgtgatacgctactagctaatcgtgggaaagctgcggggctggctgcaaatatgattggtcagactaaacaaattattgcgttttatgctggcccgcttccatttgtaatgctgaatccgcgtattattcaaaaaaagcagatgtatcttgctagtgagggatgtctgtcactagaaggcgagcgtaatgttcagcgctatgaagaaattactgttacttatcagaatatggagttagaaacagtaacgcaaacttttggtgactttatagctgaaacgattcagcatgaaattgatcattgcaatggaattctgatttgaatagtagaatatttacgtgattttgcaaaaaaagtaaaaaaatttaaattaattttgcatggtttcagggatgaaaacccacaattttcgaataattagatttgatagaataaaatactttttaatttaatgcaaagataaagaaaaatatattacaacactacctagtgtatcgtgaagaacccgaacgaagagcaagacttgccaaagcggagaaaataaggtaaattaataaagtcgcttcgagagatgcgacgagagcttaaaaacagacatgcaaggaaagaaaacaaataaaaagaaaaaagtacttgcaaagaagtaaataagctggtaatatatttaaatgtcgtcaggtgaaagcagaaaaagcttgagtaagacgaaaaaacaaatcaaaaaagttcttgacaaagaaatgatggtttgataaaatataaaagctgtctgctttgcaaaaaaagcaagacagaggtagtactttgaaaactgaacaaagtttcgctaaaagtgtgcgggtgtaaaaacccaaacaagaagcgaagtcaattcgcaagcaataaatttgagacaaagatcttaaataaggaatgagcaatcattcaaactttttaaaatgagagtttgatcctggctcaggacgaacgctggcggcgtgcctaatacatgcaagtcgagcgagcggaactaacagatttacctcggtaatgacgttaggaaagcgagcggcggatgggtgagtaacacgtggggaacctgccccatagtctgggataccacttggaaacaggtgctaataccggataagaaagcagatcgcatgatcagcttttaaaaggcggcgtaagctgtcgctatgggatggccccgcggtgcattagctagttggtaaggtaaaggcttaccaaggcgatgatgcatagccgagttgagagactgatcggccacattgggactgagacacggcccaaactcctacgggaggcagcagtagggaatcttccacaatggacgcaagtctgatggagcaacgccgcgtgagtgaagaaggttttcggatcgtaaagctctgttgttggtgaagaaggatagaggtagtaactggcctttatttgacggtaatcaaccagaaagtcacggctaactacgtgccagcagccgcggtaatacgtaggtggcaagcgttgtccggatttattgggcgtaaagcgagcgcaggcggaagaataagtctgatgtgaaagccctcggcttaaccgaggaactgcatcggaaactgtttttcttgagtgcagaagaggagagtggaactccatgtgtagcggtggaatgcgtagatatatggaagaacaccagtggcgaaggcggctctctggtctgcaactgacgctgaggctcgaaagcatgggtagcgaacaggattagataccctggtagtccatgccgtaaacgatgagtgctaagtgttgggaggtttccgcctctcagtgctgcagctaacgcattaagcactccgcctggggagtacgaccgcaaggttgaaactcaaaggaattgacgggggcccgcacaagcggtggagcatgtggtttaattcgaagcaacgcgaagaaccttaccaggtcttgacatctagtgccatttgtagagatacaaagttcccttcggggacgctaagacaggtggtgcatggctgtcgtcagctcgtgtcgtgagatgttgggttaagtcccgcaacgagcgcaacccttgttattagttgccagcattaagttgggcactctaatgagactgccggtgacaaaccggaggaaggtggggatgacgtcaagtcatcatgccccttatgacctgggctacacacgtgctacaatgggcagtacaacgagaagcgagcctgcgaaggcaagcgaatctctgaaagctgttctcagttcggactgcagtctgcaactcgactgcacgaagctggaatcgctagtaatcgcggatcagcacgccgcggtgaatacgttcccgggccttgtacacaccgcccgtcacaccatgggagtctgcaatgcccaaagccggtggcctaaccttcgggaaggagccgtctaaggcagggcagatgactggggtgaagtcgtaacaaggtagccgtaggagaacctgcggctggatcacctcctttctaaggaagcgaaggatatggagagcaggaatgctaagagaagtatccagagcaagcggaagcacactgagaaactttgtttagttttgagggtagtacctcaaaaagagctagtacattgaaaactgaatataatccaagcaaaaaaccgagacaatcaaagagaacagattgtagagcgaccgagaagagaattcttgagtaaggtcaagtagaaaagggcgcacggtgaatgcctaggcactaacagccgaagaaggacgtgacgaactacgaaaagcttcggggagcggtaagtacgcagtgatccggagatatccgaatgggggaacccaatgcagagatgcattattgattagtgaatagatagctaatcaaaggaagacgcagtgaactgaaacatctaagtagctgcaggaagagaaagaaagatcgatttccttagtagcggcgagcgaagaggaaagagcccaaaccaagtgatttatcatttggggttgtaggactgcgacgtggtagtgtaagagatagttgaattatctgggaaggtaagccagagagggtgagagccccgtaagcgaaatctcaagcacgcctagcagaatcctgagtaggccgggacacgaggaatcccggttgaaaccgcgaggaccatctcgcaaggctaaatactagttagtgaccgatagtgaaccagtaccgtgagggaaaggtgaaaagaaccccggaaggggagtgaaaaagaacctgaaaccgtgtgtctacaagtagtcaaagcacattaaagtgcaatggcgtgccttttgtagaatgaaccggcgagttacgttatctagcgaggttaagtcagaaaagacggagccggagcgaaagcgagtcttaatagggcgaaaagttaggtgacgtagacccgaaaccaagtgacctacccatgaccaggctgaaggtgtggtaaaacgcactggagggccgaacccacgtaagttaaaaattgcggggatgagttgtgggtagcggtgaaattccaaacgaacttggagatagctggttctctccgaaatagctttagggctagcctcgtggagaggataatggaggtagagctctgtttggactaggggcccgtcaggggttactgaatccagataaactacgaattccagatatccatacacgggagtcagactgcgagtgataagatccgtagtcgaaagggaaacagcccagatcaccagttaaggtccccaaatctatgctaagtggaaaaggatgtggagttgcgtagacaactaggacgttggctcagaagcagccatcattcaaagagtgcgtaatagctcactagtcgagtggcgctgcgccgaaaatttaccggggctaagcatagtaccgaaactgtggatgtgttttaaagagcacgtggtaggagagcgttctaagagcggagaagttgaatcgagaggatcaatggagcgcttagaagtgagaatgccggtatgagtagcgaaagataggtgagaatcctatccgccgaaagactaaggtttcctggggcaggctcgtccgcccagggtaagtcgggacctaaggcaaggccgagaggcgtagtcgatggataacaggtagagattcctgtactgtgtcaaatcgttaagagcgaaggagggacgcaggaggtgaagcacgcatcgcgatggaacgatgttcaagcaacaagtgcggttaagagtcaaatgcttctaaccagcaacacgagttgtgaagaggagtgaattaaaagtagcgaaggtgtggtaatcacactgccaagaaaagcttctagccagagatgacatacccgtaccgcaaaccgacacaggtagtcgagtggagaacactaaggtgagcgagagaactctcgttaaggaactcggcaaaatgaccccgtaacttcggaagaaggggtgctagccaagagattggttagccgcagtgaataggcccaaacaactgtttatcaaaaacacaggtctctgcaaaatcgtaagatgacgtatagaggctgacacctgcccggtgctggaaggttaagaggagagcttagcgtaagcgaaggtttgaattgaagccccagtaaacggcggccgtaactataacggtcctaaggtagcgaaattccttgtcgggtaagttccgacctgcacgaaaggtgtaatgatttgggcactgtctcaacgagagactcggtgaaattataatacccgtgaagatgcgggttacccgcgacaggacggaaagaccccatggagcttcactgtagcttgatattgagtatcttttaaacatgtacaggataggtaggagccagagaagataggacgctagtcttattggaggcaatgttgggatactacccttgtttgaaggatgctctaacctcgacctgtaagccaggccagggacagtgtcaggtgggcagtttgactggggcggtcgcctcctaaagtgtaacggaggcgctcaaaggttccctcagaatggttggaaatcattcgcagagtgtaaaggtataagggagcttgactgcgagagagacaactcgagcaggtaggaaactaggacttagtgatctggtggtaccgtatggaagggccatcactcaacggataaaagctaccctggggataacaggcttatctcccccaagagttcacatcgacggggaggtttggcacctcgatgtcggctcgtcgcatcctggggctgaagtcggtcccaagggttgggctgttcgcccattaaagcggcacgcgagctgggttcagaacgtcgtgagacagttcggtccctatccgtcgtgggcgtaggaaatttgagaggagctgtccttagtacgagaggaccgggatggacgcaccgctggtgtaccagttgttccgccaggagcatcgctgggtagctatgtgcggaagggataagcgctgaaagcatctaagtgcgaagcccccctcaagatgagatttcctttgcgtaagcagtaagacacctcagagacgatgaggtagataggctgggagtggaagtcctgtgaaggatggagcggaccagtactaatcagtcgaggacttgaccaaagcgaagcaaactggaaggttttttgcgagaaggattatgtttagttttgagtgtaaaagctcaaaagagtacggtggcgaaagcaagaaggatacacctgttcccatgccgaacacagaagttaagcttcttaacgccgaaagtagttggtgggcaactgcctgcgaggaaaggaagctgccgtgctcttttttaatattccggcttagctcagttggtagagcgcttgactgttaatcaagatgtcgtcagttcgagtctgacagccggagtaaaggggagaaggaagcggaagacttcttttttgtgccttttgggtatgttaaaaggctaattaggctaagcaagcatgacttgagggtcaaatttaatataatcattaatagaagacatagtaaaattcctaacaagcttaattgaattgattacggaggctatgctctctttttaagtgcataaaaatcttatagatagatacgcgtggtgctagttaaatcgttctagacaataagccaaattataagctaaaattgcaatttccaaccggctttgaaagcctatcagactacgtgctcgattgttctcggcattgtaataggtcagaagcgaaaagtcgctttcaattgttctgcgaatagccatcaattgatgatcattgtgctttttagctcctgtcatatttttacgatatggtgtccaaagttcgtaacccatttgttttagctgttgatgcagttctttgcctaaatagccttcgtcgccaagaagatagtaattagatggatgggtattttctatcagttcaactgtctccctggcatcatgaactgatgcctttgttacgacataatcaagaatgtaaccgtcatcgctaacaatggcatgaactttgaaaccatagaagtaaattttcttggtggccttataaccaatgttggcataaccgcgaaaaattttagcacgatagttgcgaattggttggcaaacaggtaccggaaagctgtcaatgatcaagaaatgtccattcaggtcaacctttttattcatttcttgccgtatctgataaatcaattgcaatagctgacgtgaacgccgattaaaacgtgagtgtgataaacaattgaaacattcacagaatcttctttgtgattcaattcctgtcttagcttgccagataagtaaagccaaaatcagactgtccgtagttttaatttgatcaatatttcgccgatgagtaaactcagccggtgcatacaaacgataccagtgccgacaaattatcactaaatctttaaaactaacttgtaaatggtggctaaaacgcttaagcttaaggcagttcaatcagatcagactcttttctattattactatttacaagtcgagtctaacaagattggacttttttattaactaaaacgatttaactagcaccacgcgtagatagattattataaatacgcgtggtgctagttaaatcgttctaggcaatatgccatattataagctaaaatggctatttctagccgctgctgaaaaccagctaagcaaagaaaagtcgctctcaattgttcttctaattgccatcagttgatgatcgttatgctttttagcgcctttcatgtttcttcgatatggtgtccaaaggacatagcccataccttttaactcggcagttaagtcttttcctaagtagccttcatcgcctaaaagataatggttaattggatgagcattaatcatcaattctgtcgtttctttggcatcatgcactgatgctttagttcaagtacatagccatcatcgcttactagcgcgtgaaccttgaagccgtaataatagatttttttagtggctttctagccgatatcagctatgccacgaaagatcttgacgcgatagttgcggataggctgacaaactgggaaactgtcaataattaagaattctccagctgtttttacttcttgattccaatcttgacggatacagcgcattaaaggcaaaagcattcgtgcccgacgattaaagcgagaatgagacaaaccgacaaagaatttacaaaatcttctttgagattcgataccaatttcagtttgccaaataagcatcgctaagatggagctgtcagaaattttaacctgatcaacatttttacggtgcttcaattcatcaggagcacaaagcttgtacaaagaacgacaaattacatttaaccgagcaaagctaacttgtaaatggtgagaaaaacgattaagcttgagatagttcaattagatcggactcttttctatttaatttaagttacaacttgagtctaatccgattggacttttttattaactagcaccacgcgtttataaatattcaacgacagtaaaattaggtaagcaatctatatctaggaatctgttggggttctgattgtagtaggctaattatacaaaaatgagttaacaaaattctgatcagaattagtacggttaagattgaaaaaatagctggtaattattactgtatctctttgtaattaggtagcaatgctattttttacttctaaaatataattaaaccggtcagacaattcgtattgatctgaatttggataaacagttataacaaaactatgtgtgcaaagcagatgacagggacttttaattgatctcgtatgttggagcgcgctgtgttgactatttgttctaagtgaacagatgataagtatgcctctatctaagtaccaagatctaggaaattcattctgaagtagttaatatgtgtcaatatgtcgcacaaaggtaactatgaattacagcaacataagagaaatttgaaaaatagtttttaaattgtggcttgttattagtgaaaatgataaattaaatattattttggcagaaaatacagcttaataacaaaaaataaaaatattttttgcttacctttaaaaatatagttcgagatttataaagtttttaacgagttaaagtgatatttctataattgaaagcagattctactaatgtaattactataatcagaataaatatttcataaaaatacatagaacccgaacgaagagcaagacttgccaaagcggagaaaataaggtaaattaataaagtcgcttcgagagatgcgacgagagcttaaaaacagacatgcaaggaaagaaaacaaataaaaagaaaaaagtacttgcaaagaagtaaataagctggtaatatatttaaatgtcgtcaggtgaaagcagaaaaagcttgagtaagacgaaaaaacaaatcaaaaaagttcttgacaaagaaatgatggtttgataaaatataaaagctgtctgctttgcaaaaaaagcaagacagaggtagtactttgaaaactgaacaaagtttcgctaaaagtgtgcgggtgtaaaaacccaaacaagaagcgaagtcaattcgcaagcaataaatttgagacaaagatcttaaataaggaatgagcaatcattcaaactttttaaaatgagagtttgatcctggctcaggacgaacgctggcggcgtgcctaatacatgcaagtcgagcgagcggaactaacagatttacctcggtaatgacgttaggaaagcgagcggcggatgggtgagtaacacgtggggaacctgccccatagtctgggataccacttggaaacaggtgctaataccggataagaaagcagatcgcatgatcagcttttaaaaggcggcgtaagctgtcgctatgggatggccccgcggtgcattagctagttggtaaggtaaaggcttaccaaggcgatgatgcatagccgagttgagagactgatcggccacattgggactgagacacggcccaaactcctacgggaggcagcagtagggaatcttccacaatggacgcaagtctgatggagcaacgccgcgtgagtgaagaaggttttcggatcgtaaagctctgttgttggtgaagaaggatagaggtagtaactggcctttatttgacggtaatcaaccagaaagtcacggctaactacgtgccagcagccgcggtaatacgtaggtggcaagcgttgtccggatttattgggcgtaaagcgagcgcaggcggaagaataagtctgatgtgaaagccctcggcttaaccgaggaactgcatcggaaactgtttttcttgagtgcagaagaggagagtggaactccatgtgtagcggtggaatgcgtagatatatggaagaacaccagtggcgaaggcggctctctggtctgcaactgacgctgaggctcgaaagcatgggtagcgaacaggattagataccctggtagtccatgccgtaaacgatgagtgctaagtgttgggaggtttccgcctctcagtgctgcagctaacgcattaagcactccgcctggggagtacgaccgcaaggttgaaactcaaaggaattgacgggggcccgcacaagcggtggagcatgtggtttaattcgaagcaacgcgaagaaccttaccaggtcttgacatctagtgccatttgtagagatacaaagttcccttcggggacgctaagacaggtggtgcatggctgtcgtcagctcgtgtcgtgagatgttgggttaagtcccgcaacgagcgcaacccttgttattagttgccagcattaagttgggcactctaatgagactgccggtgacaaaccggaggaaggtggggatgacgtcaagtcatcatgccccttatgacctgggctacacacgtgctacaatgggcagtacaacgagaagcgagcctgcgaaggcaagcgaatctctgaaagctgttctcagttcggactgcagtctgcaactcgactgcacgaagctggaatcgctagtaatcgcggatcagcacgccgcggtgaatacgttcccgggccttgtacacaccgcccgtcacaccatgggagtctgcaatgcccaaagccggtggcctaaccttcgggaaggagccgtctaaggcagggcagatgactggggtgaagtcgtaacaaggtagccgtaggagaacctgcggctggatcacctcctttctaaggaagcgaaggatatggagagcaggaatgctaagagaagtatccagagcaagcggaagcacactgagaaactttgtttagttttgagggtagtacctcaaagatttgaaaaacgccaagcgttagtcgggcctatagctcagctggtttagagcgcacgcctgataagcgtgaggtcgatggttcaagtccatttaggcccattgacataacgaagaaaaagagttaaagttatgtctggccgaaaataaaatactctgggggcttagctcagttgggagagcacctgctttgcacgcaggaggtcatcggttcgaacccgttagcctccattgatccagaaaaaggatcaaagagctagtacattgaaaactgaatataatccaagcaaaaaaccgagacaatcaaagagaacagattgtagagcgaccgagaagagaattcttgagtaaggtcaagtagaaaagggcgcacggtgaatgcctaggcactaacagccgaagaaggacgtgacgaactacgaaaagcttcggggagcggtaagtacgcagtgatccggagatatccgaatgggggaacccaatgcagagatgcattattgattagtgaatagatagctaatcaaaggaagacgcagtgaactgaaacatctaagtagctgcaggaagagaaagaaagatcgatttccttagtagcggcgagcgaagaggaaagagcccaaaccaagtgatttatcatttggggttgtaggactgcgacgtggcagtgtaagagatagttgaattatctgggaaggtaagccagagagggtgagagccccgtaagcgaaatctcaagcacgcctagcagaatcctgagtaggccgggacacgaggaatcccggttgaaaccgcgaggaccatctcgcaaggctaaatactagttagtgaccgatagtgaaccagtaccgtgagggaaaggtgaaaagaaccccggaaggggagtgaaaaagaacctgaaaccgtgtgtctacaagtagtcaaagcacattaaagtgcaatggcgtgccttttgtagaatgaaccggcgagttacgttatctagcgaggttaagtcagaaaagacggagccggagcgaaagcgagtcttaatagggcgaaaagttaggtgacgtagacccgaaaccaagtgacctacccatgaccaggctgaaggtgtggtaaaacgcactggagggccgaacccacgtaagttaaaaattgcggggatgagttgtgggtagcggtgaaattccaaacgaacttggagatagctggttctctccgaaatagctttagggctagcctcgtggagaggataatggaggtagagctctgtttggactaggggcccgtcaggggttactgaatccagataaactacgaattccagatatccatacacgggagtcagactgcgagtgataagatccgtagtcgaaagggaaacagcccagatcaccagttaaggtccccaaatctatgctaagtggaaaaggatgtggagttgcgtagacaactaggacgttggctcagaagcagccatcattcaaagagtgcgtaatagctcactagtcgagtggcgctgcgccgaaaatttaccggggctaagcatagtaccgaaactgtggatgtgttttaaagagcacgtggtaggagagcgttctaagagcggagaagttgaatcgagaggatcaatggagcgcttagaagtgagaatgccggtatgagtagcgaaagataggtgagaatcctatccgccgaaagactaaggtttcctggggcaggctcgtccgcccagggtaagtcgggacctaaggcaaggccgagaggcgtagtcgatggataacaggtagagattcctgtactgtgtcaaatcgttaagagcgaaggagggacgcaggaggtgaagcacgcatcgcgatggaacgatgttcaagcaacaagtgcggttaagagtcaaatgcttctaaccagcaacacgagttgtgaagaggagtgaattaaaagtagcgaaggtgtggtaatcacactgccaagaaaagcttctagccagagatgacatacccgtaccgcaaaccgacacaggtagtcgagtggagaacactaaggtgagcgagagaactctcgttaaggaactcggcaaaatgaccccgtaacttcggaagaaggggtgctagccaagagattggttagccgcagtgaataggcccaaacaactgtttatcaaaaacacaggtctctgcaaaatcgtaagatgacgtatagaggctgacacctgcccggtgctggaaggttaagaggagagcttagcgtaagcgaaggtttgaattgaagccccagtaaacggcggccgtaactataacggtcctaaggtagcgaaattccttgtcgggtaagttccgacctgcacgaaaggtgtaatgatttgggcactgtctcaacgagagactcggtgaaattataatacccgtgaagatgcgggttacccgcgacaggacggaaagaccccatggagcttcactgtagcttgatattgagtatcttttaaacatgtacaggataggtaggagccagagaagataggacgctagtcttattggaggcaatgttgggatactacccttgtttgaaggatgctctaacctcgacctgtaagccaggccagggacagtgtcaggtgggcagtttgactggggcggtcgcctcctaaagtgtaacggaggcgctcaaaggttccctcagaatggttggaaatcattcgcagagtgtaaaggtataagggagcttgactgcgagagagacaactcgagcaggtaggaaactaggacttagtgatctggtggtaccgtatggaagggccatcactcaacggataaaagctaccctggggataacaggcttatctcccccaagagttcacatcgacggggaggtttggcacctcgatgtcggctcgtcgcatcctggggctgaagtcggtcccaagggttgggctgttcgcccattaaagcggcacgcgagctgggttcagaacgtcgtgagacagttcggtccctatccgtcgtgggcgtaggaaatttgagaggagctgtccttagtacgagaggaccgggatggacgcaccgctggtgtaccagttgttccgccaggagcatcgctgggtagctatgtgcggaagggataagcgctgaaagcatctaagtgcgaagcccccctcaagatgagatttcctttgcgtaagcagtaagacacctcagagacgatgaggtagataggctgggagtggaagtcctgtgaaggatggagcggaccagtactaatcagtcgaggacttgaccaaagcgaagcaaactggaaggttttttgcgagaaggattatgtttagttttgagtgtaaaagctcaaaagagtacggtggcgaaagcaagaaggatacacctgttcccatgccgaacacagaagttaagcttcttaacgccgaaagtagttggtgggcaactgcctgcgaggaaaggaagctgccgtgctcttttttaatattccggcttagctcagttggtagagcgcttgactgttaatcaagatgtcgtcagttcgagtctgacagccggagctagcggaatatgaaagaggcgggggccagaggcttccgcctttttgtgtgctattaaagttctataattaagcttttctaagtcttgaaatttttttaaatagggtttccaaggaactttgaggagtttgtactctgaatggtattgatggatacgttattttttctgccggaaagccacagaatggacaagtgggctgctttaaaagggcttcgtagactttgtattgcactccattgaagaatttatagaaattgttgtaaaaaacgatatttttatctttaatatcgagatcaaatttaatacaatcattaacagaggacatagcacaactcctaaatagcttaattgagacagaatatcataaatattcatcaacaggaaaaattatagagctaataaagaagttatagctttttatttgcgttatgaaatgtataaacttgttgtctttgtctctctattagactggtaaatattcaaaagtatatgttaaatttcagacattaaatacttagaaaaaaggacatatttagatggataaaaattctgatagacttacgttagtgccatatttcccgaatgaaaagcagactcttaaatggtaccaggatcctaaaatctgtaagcaggtagataatattgataccgtttatgatttaactaaattacgtcgaatgtatgaatatttgtcagtgcatgggtggtgctactatattcaatatcaagggaaattgattggtgattgtactttgctaaaagacggtgagatatcaatcgtgatttgcaaagaatatcaaaacttgcatcttggtagaaaatgtgtcgacaaattgttgcagcttgcaagaattcagaaaatgacgcaagtgaaggctcacatatatgactttaatattcaaagcaaaaaaatgtttacaagaatggggtttaaagagcaacaacctgactggtactcttatgatttatagatcaaaaatattcatgttaccaagtaattcatacaaacaatcagttggtgtgatgtcagataagcactcgtattagaaaaatgtaatcatcagtaattaaagactgtagttgaatcaaataattaactcagcgtataaaatgctgagttagacaaaaaaacaacgagcaattctctcgttgttttatggattcattttgatcaaatttttagtttatctttagttgtaaataccaacttgattaatgtgggccaattccagaactggagattgagcgaggtccaaactaacatcacagccagcatggataccattattttcgccattaagccagtgggtattattagttacgtcatagacagtaccattaaatgcaatataagctggacgtccatttttaccattgtaatttgatagagtttctttagtaaattttctcatataagaagctcctttctaataagatcttgatatattaatggtaacactttgtcaccttatagcaagagatacgaaggagtcttatgcttttcttatgaaagatgaccacgccacccagcaatatcccaatctagaaagtcataattaagctttttaccataaattttctcgtaggcagcaactttttgtcggtagtcgagttccatcatcttatgagcgttttcgttggcgtttagagaaacgtcagggaagattggtggtaaaacatggacaatatatttggtctcataaaaattaggatctttcttttcgattttaggtagatccttaatctcgacaaaagtggagactaccggtacattttgtttagccgcaaaataataggcaccacgttgtaatttgcgaggcttgcgataattccaccacatctcctgttctggataaattaaaacccaattatttttagctaaagctgcactgaggtgcttaggaaattcatttccaatatagctaggactctgaactagtggaatagtgccaacataattcattaaatagcggaaaaatcccggtagcattaggttagtatcttcaattacaattgaaagctgatggtgcatcttgttagcgagcagcttcattggtaaagaatcaacctgattgtagtggttagaagttaaaattgcgccaccaataggtaaattatttaggttctctaaacctacaaattcagttgatccagctaatgctctggataaagtaccaaataagagatgtccaatacgattattaagcttacttgaaaaagtgttacgcttattccaataatcattgaccaatttaaggcgctgatctagggacatttggggatcgccgatttctacttttgctgtgaagttacgttcattagcagctttttttatatttttaatcactgcctcacgattatcgccaaaaatcatagtgttactgcctctcgtttcttaacttttgcccaattattaggatcttgctcagttttgtcttccttagcaagcatatgatccaatttttcgcggtctgctgcacgctcgtcatcagtataattattgagttcgttctttaattcatcgaaaaactgcgtttgtttggcactatcccagaagtactgtgcatattggacattagcaaaatgccatggcttaaagaaaagattatagtgaatcagaccaggattagttaaaggttcagtgttttcatttggcatagcatcccagcgaggatttaagtgcaaaattctgccttccccgatttcatttaaatagtcttgatcaggagcaatacaatcaaaatgatacttttctaaaagtgtcataaaatggtcaataaaatgttcagcgcgaaaggccctagcattcatgacgagcatgccagagttaatgtatttcttggggtcaagtgccaggacatttttgatgtattttatcatcttgtctacatattgaattgaggagtcggtgcaagcagcaaataaattatcacccaattcggagttgtatagtttagcaagatcgtcgtttacaattgtgtcgctatcaatatagatcaccttatcatattcgggaaaaagttctggaataaagaggcgataaaaaatcgacatggtaaaaaagtcagcgcgaagaaagttttccttacgattttgaataggttgtacaagttgatcatcaatatggaaaaacttcacatgaacgtttgaactgctaagatcagacaaagctttttgatgctttgatgagagatcttgatttaaaaagtaaacagtataatccttatttggatctgtatgtttgactaaagaattaagagaaacagcagcgtatttggtaaagtcatcgctgatactgtaaaaaataggaattgtcataaaattacctttcttagattttaactgattccgtttgtttaaccttagcccaggtatttggctctttgacaatcatgtcaacttttttggccatccattctaggttagctcgggccttttgacggtcttcatcagtaaagttgtctaattgctgctttagttcatcgtaatacggcgtagttttagcaacataccagaaataatgaccatattgaacatcagcaaaatgccatggtttgaagaaaagattgtagtgcacgatcttaggatcttgaatttcaggaatgctttcatttggcatagcatcccattctttaggtaggtgataaatcttatcttcgcaaatttcattcatgtaggcttgatcagggtcaacgttatcgaaatgatatttattcattaagtaatagaatttatcaacaaactttttgtctctaaaggccttcatattaaacagaattacaccattattgatgtatttttctgcaggaaaaattccctgacattctttaatgtacttttgtaaaagtggcatgtaacgaattgataagtcgggacatgaagcaaacatgttgtcggcgatatcaatttcatacattttagcaatatcagtacagataatagtatctgcatcaagataaactgccttgtcatattgagggaacaattctggaatgaatagtcggtaaaaaattgacatagtaaagaattgagcacgcaagtagttttccttagtattgtgaattggcttaaccatgtcatcgtcaatatgaaagatttgaacatgaatattatcagttgaaagatcttctaagctctttttgtgctcatcagatatctgttggactaaaagggtaatcgtatagtccttcttggggtcagtatggtcaattaatgatttaattgaaacatatgcatatggcgtataattatcgctaattgtgtaaaaaacaggaatggttttcaaaataagatcctcctaaattatttttttaaattatttcgtaatttgagatattcgttaagcaaatcatcatattcatgtaaatgaagtacactgtgtacgcgatcaacatcccatggcttaactgtttgagtatggaaataaggccaaaacctaaagctagtagtgaaatgttgaattttggtgtttttttgcaaatgatattgctcattataacggcgtggtgctactcgcttggctacagctagcttgtttattgctgattggtcgggcaaaaacatttgcttaacctgcatcatatgccgcacctcggcaaagagatcagtttgcttaattttcttcatattcagcaacaaaacgccagaattaagataatcaaatgcgcgcttggtcttaagattgtggaagaagaagcggccccaataatcaagtacgcccactaattcgattccggtaatatcctcattgtaaaaagttgtaatatcaccgcgaatgacaatgtcatcgtctaaataaagaatgcgatcaggaatctgtggcaattggtctgcaaataaacgcaacatagcatatggcgtgaagcgagtattcatgttagcggttggcggttcctgttcaaataacttggtgcagtcaattaattcaactgtactgttaggattggctttttttactaaagaacgtaaaaaatcagccgcatgttgtgagaaagggtgatatttacgttcatcactgtgtgcctccatcgttaaaatataaagatgcaattcttgagcaccagaatttttgattaaagataaggtggaaatcaaaacgccatcttgagcattttcatctccacaaaaaagaatattcatgataaactcctattttttatttcttttgaatatattgacaatattcataatcgctattttttgcacgctgcttcattacctgccaaatttcatcgtgaagcttattttgagcttccttacggcttaaatttgtatccgggtaaaagggcccatcaatgtaaataacggcactaggccgcttgctaagccactttttatggtaggttttggtcatgacgaaactaggcgcatttaatttaactggaaagtgcatgcttgttgcatcgaacgggcgaatcttcgtgtaatagggccagacatgagcttcagggtagatgagaatctcgccctttttatccttaatcacagtttgaatggctttaattagtttgagcgattgcttcatatttttgccaacaggcagaccgccgtagcgtacaagatatttgccaatgaaggggatgccccagttagcttgattagcaatagcataaaaatttttgattggaaaaattgtgagcgaggtaaagacatcccccatgggtctagtatggttgccataaataaaatagcccccattgacttgcttaagtttttcttgaccaacgacttttacatgatcgaagaagcggaaaaccacccaaccaaaagcgcatgctaagtgacaagcggtagtggaccagattctagctccaagagaattaggtagaataacgtaattatcgggtagactgaaattttgatcgtgactatcgactacatcatcggttgttttttggtaataataaatccgtttcatcttgccctccatgatacttatgtatcctatgataccatggaaaaaagcctaattcctaagacgagaggaatgctgaaagaaaataaaaaagattcgtaatttcatgatcgaaaaatacgaatcctctgtaaaatagcataaaaaaagcaccgccttcttgcagtgcatctttcatattatgggtggccaggggatcgaaccctggacccacggattaagagtccgttgctctgccagctgagctagccacccatatttgttcatcagctcccgccgacatttaaatatattaccagtagttttataatttgacaagctttttttgaaaaaagttgaaaaataatttgaagctagcaaaaagcgcccataatggccgcttttttactaaagtttatcttgaatatgataggctgtgccttgctgatcctgcttcatgtgatctgcatagtaaacagcatagacaccgctttgatcatttttggcaatcacaatttggcgccctgttggacgttctgccttaatgatttgagcactgcggcgtgcttctttaaagtcgtgtgaagatgcgatggcatcccctggattaaaaaatacagcttcgttcattgtaaagccccctcgtacaaattctaattttattttaccaataaagccctttctaaatccaatttaagaaacaaaaaagagataagatcaacatcttatctcttacgaaaaatattatgggtggccaggggatcgaaccctggacccacggattaagagtccgttgctctgccagctgagctagccacccatgtcgttgaatcaatcaacagatattattatgctattgttgataagaaaatgcaagctttttttgaaaaaaaacaaaaatttttggctaatgttacaaaattcagtataatgtaagggcaaaggaggcattcccgatgccaaagaagattctcgtcgtcgacgatgaaaagccgatttctgatattatcaaatttaatttaactaaggaaggctttgatgtcgacaccgcctatgatggcgaagaagctgttaaaaaagttgacgaatacgacccggatctaatgattctggatttgatgttgcccaaaaaagatgggttggaagttgcgcgtgaagttcgtcaaacgcatgacatgccaattatcatggtaactgctaaagatactgaaattgataaagtcttaggactggaaatgggtgcagatgactacgtaaccaagccgttttctaaccgggaattagttgcccgtgtgaaggctaacctgcgtcgtcgtgatattgttaaaaaagcagaagctgccagccaagaagagaccgataagaatattaagatcggtaacttggtcattatgccagatgcctatattgtagaaaaaaatggtaagaagattgaacttactcaccgtgaatttgaacttctttactatttagctcaacatatgggacaagttatgactcgtgaacacctgcttcagactgtttggggttatgactacttcggtgatgtgcggactgtagacgtaacggtgcaccgtttaagagaaaagattgaagataatccaatccaacctcaaattttagttacccgtcgtggtgttggctattatgtaaaacagccgagtgaagaataataaagaaagccacagaactgttatggtagtggctttcttttttatattttttagatattgaatgagtagaatgaaaaaattcaaagcaagattaaatagtacatttaattccattaatactaaaattgcaattgtgttcatgctgatgctactggcaacaattgaagttattggagcttattttacccgtcaattagagcaaaatagcattgaaaatttccaatcatcaatccagattcagactatcgtcagcaatcagttagctaatcagttgaccagtgataataaaaatactaatgatcgcttgaatcaaattgttaatgactacaataatgatgcaattagtgaaattattgttgtcgataataaggatacgattcgtgccgtttctaacttaaatgataaaagtaagatcggtcaacggattaacaatactgatgtgaagcaggttatttcaactggacatcaaattaataaagtggtcgatgatcatggcaattacatgattcaaatatcgccgttgactagtggcaatggctctaacaatactgttggtgctgtctatgttaaagctagtatgcaagatgtctttaacaatttgcgccaaatttcattgactttcttgattgcgtcattgatcgcggctttattaggtgcatttttgtcattagttatttcccgggcaattacgcaaccgatcgaagaaatgcagaaacaagcattgcatattgctgatggtgattattcaagtcaggtaaaaatttattccaatgatgaactagggcaattagctaaagcatttaataccctgtccgtacgaattgaacgctcacaagaagagtctgatagtgaacggcggcgactagatagtgttctgtcacacatgagcgatggagttctagccactgatcgtcatggtaacgtcagtgtggttaatcatatggcactaaactttttaaataaaaaagaagacgaggttatcaataagccgattgctgaagtactgggactagaagatacttcgtcacaagatttgatttctagtcaaaaagagatcgttattacccttgatccaggtacgcgggatgaaattattttgcatgctagtttttctttgattaagcgggtaactggctttgtatcagggtcagtttgtgtattacacgatgtaactgagcaacaaaagaatgaagattcacaaagacagtttgtttctaatgtctcacacgaattgagaacacctttaacaagtttgcaggcttatattgaagctcttaatgagggtgcttggaagaatccagagattgctcctaagtttttggaagttacccaacaagaaactagtcggatgattagaatgatcaatgacttgttgagtttgtctagaatggaccgtggcgtttcaaaaatggatctagaatttgttaacttaaacgattttgttaaccatattcttaaccgtttcgatatgattgttaaaacagataaaaataaagaaaagaagaaatacacaattaagcgtgaattaggcagtcaagccttatgggtggaaatcgataccgataagatgatgcaggtaattgataacattatgaacaatgcaattaagtattcacctgatggcggtgtaattactgttagaatgacccaaaaccaaaatcatgttatcttaagtatttctgaccagggcttgggtattccaagaaaagatctgggtaaaatctttgaccgcttttaccgagttgataaggcacgttcccgggcccaaggtggtaccggcttgggcttggccattgctaaagaaattgtggaagctcaccatggtaaaatttgggctgacagtagcgaaggcaaggggtctactttctatatttccttgccatatgaaccgatgacagaggaggatgattgggatgaagtttaaattcaaattcggtgaatttttcttaggcttagctacactgatcgtcattgtcctctcaattgtgctttggatctttattatgactagtgatcagcgctttagtaatattggtcagcaaaatcaaaataatatcactaaagagcaaacgcgtagtcacaattttaagtcattatatgatttatatattccaactacttcatatggttttgctaatggaaatttgtgtcagctatatgattcaaaaaataatttgactttagaatttaccaaagagataaaaaaagccaaggccactaataaaattaagaaaatagttgatactagaactaaatatgaagagtatttaaacaatcccaactatgtgcagttggtttatccagatgaaattactttctccttatttaaccagttgaataatgccgcaaatgataaccgcgagtttaaccgcttctttatctcgcagtcaaatcactggatttatttgggaaatgatcagactaatgaaatttatcaagtaaaaattgctggcgcaaattttgataaactacgtaaatatgcatgtaatgctaagagcaagtatccagttagattagttcgtttaaaggaaggctattcaccgttttacatcaagacaatgaatgctaaagtttatagttacttgactaatcatcaatcgtattcttactttgtttcgcgtttattaggtacatctggcgttactagtaagactaataagaatggtcaaacggtatattctttgaactactatactcgcttaagagtgccagattctaattcaggtgagcataattatctttatactcattatgaaaaaaataagatccccaatactactaaccgcttattagatagcgtttattatgttcaccaattgggtttaaccgagcaagatttacgcttctttgatgcagatggtgctaatgttagttatctaaactatattgaagggattcctgttttcttaaataagcatgatttgcaagtcaagacgaccttttcaacagattcgattaatgtggcctttaatagtgtaaacttccaaattccaattccgtttgatggtcaaactaagcggttaaaaccaacccaagatgttgttgatgaattagtcaatcacggcctaaagcaggaagatattcaacgaattatcgttggttttgctgaagaaaaggattcaagtcaccatagtttgattaacttgatcccaacgtactatatcaaagcctacgatgaatggaagagcctaggtgaatgggaaaagcaagacgtatctacctaccgtgaagctgatcagttaactgttaacgaagggggaaaatagaaatggaccataaacgaatcgaatggctatttttcgttgttttctttttaattgatatttatcttggaatcgaaattctccgttctcccgttaatttaagtaacgctgataccactactcgtagtgttgctagcatccgcaatgaaatgaagtcagacaatattgatttgcccgataagatttcggatgcaccagattctggttattatttagctaccaagaatcgtgactatctctctggcaaagttagctcgctgactaatgtaaatgcccgctattctaaaagcgataatgtgctttatggtgaaccaagacaagcagtccttttgagtaaaaaacctaaggaagctttagaacaaattgaagattttaagaatgattcgaaaaatattccttatggtaaagaattcaagtatgaacctgatatgtcgagtgaagacaattatgtttttgtgcaaaactcagattatggtgaaatttatgctaactcggcccaattgaatatcaatgtaaaagataatcagattattaattttactgaaacatatatggggcaagctagtccagtgcgtgaattacagtcaaccatcagtgcttggcgtgctgtgcgtgcgatgtacactgatcgtgagttgactaataattcgcgcgtaacgcaggtaaaattaggttactccaaactgacagaagtacgtggcagcacaatcttgttgccaacttggctggtttgggtagaaaataagacaactaaaaatatcacgatgaaacgtattaatgcatatacggcacagatgctacaatcgagtacctataatgtagaaaagtagaagggacaaaaattgaaggtttccgttttagcaagcggctcgaccggcaataccagtttaatcgttacaggccagcataaaatcctgatggatgctggcatttctggtaagaaaactaaagatttgctagccgaagttggagttgatattaacgagattgatatggcctttttaagtcatgatcataccgatcatagtggcggactcggcgtgttgatgcgccgttatcctaagatagatgcttttgccaatagtgggacttggcagtatttattggatacgaaaaaaataggtaaattaccggctgaacaaatgaatacaattgaaccaggccaaactaaaacttttggtgatgttgatattactgcctttgcaactagtcatgacgcagctgagccgcaatattatgtgtttactagtggtggtaagcgggtcgcttttttaactgatacaggttatgtatcagaagaagttgaagggacaattgaagatgctgatgcctatatgatggaatttaattatgataatatgatgctcagagatggaccatattcctgggcactgaagcagcgaattttgtcggatgtaggccatttatctaatgacgaagcagcccaggcattagttgatgtagtcacacctaaaacaaagcatatctttttagcgcatcgcagccaacataataatacggagtatttagctcacgaaacggcaaaggaaatgctgcttgagggggatgcgaatttggatgatgatgttaagattattgatacagaacctaatcagcctacaaaattagttgaaatttagcagttttcacaacattttttcatataatattcaaatttaatcggtatgattagtaaacaagatgaggggagaagcaagcatggtagaaaatcaaaataataataacaatttacaacaacctagaaaaaagaatactaatggtaaaatcattgccactgcagcgattgtcggtgtagttggtggcttgatcggtggaggcgtttcatattacgcagctgatcaaatgaataatgcatcagttaataatggtgccgctcaaactagtgtatcttcaagtagtagtaaagtttcagaaaagagtgctaagactagtggcacaatgactactgcatataatgatgtaaaaggagcggttgtttcagttattaacttaaaacgccaatcaagttctaatagtactaattcactttataatagtttattcggtaatgatgacagtgatgatagctattcatcaagcagcaagggcaagcttgagacttacagtgaaggctcaggtgtagtctacatgaaatctaatggcaagggctatatcgttactaacaaccacgttatctcaggcagtgatgctgttcaggtaatgctagctaatggcaagacagtaaatgctaaagttgttggtaaggatagtacaactgacttagctgtgctttcaattgatgctaagtatgtgactaagacggccgaatttggcgattctaagagcttacaagctggtcaaactgtcattgccgttggttcaccattaggtagtgaatatgcttctacggtaacgcaagggattatttcagcaccggctagaaccatttctacttcatcaggcaatcaacaaacggttattcaaactgatgccgcaattaacccaggtaactcaggtggtgccttggttaactcagctggtcaagtgatcgggattaactcaatgaagttagcccaatcaagtgatggtacttctgtcgaaggaatgggctttgcaattccatcaaacgaagtagttacgattgtgaacgaattagttaagaagggtaagattacccgtccacaacttggcgtaagggtaatcgcacttcaaggtattccagaaggctacagaagccgcttgaagataaattctactttgaagagtggtatttacattgcctcagtaaacaagaatagttcagctgctaatgccggaatgaagagcggcgacgttattaccaaggttgacggcaagaagattgatgatgtggcatcgttacacagcattttatacagccataaagtcggtgataccgtaaatgttaccgtgaacagaaatggtaaggatgtcaacttaaaggtaaaacttgagggtaactaaaaatcaaaatagaagttaattaaaagaaaaaaggctatatcacgcggtttaaacgtagatatagcctttttgttaactttttaaatgtgtaacatcaaattgttcggaattatttgttgtcaaacagacactagcctgttgataagtgtggataactctgtggattgtgtataacttgataaatataggtttattaacttgtggaaaaatatgatgattttgaccttatttagtgaattctatttgagaaaacaggcgttcatgcaggcataacaagccttaagagataaagtttgtgaaaaaaggctttcataaaatcgatgtgaataaagaaattttagaaaaattattaaatacaacttctggggtataagtaaaataataccacaaaatgttgaaattggtctttgaagttttgtggaaaagtttgggtaaatagtgtggaagggatgttagtattgtgctggtagattaaaattatgaatggaaaattagctatgcttgttataatagaagcatgaatatcaaaattgtatgtgttggaaaattaaaagagaagtattttagggatgcaattgcggagtatgagaaacgactcagtcgttttgcaaaggtgtccattgtacaggtgcctgatgaaaaagcaccggaaaaattcagtgcagctgaagatgagaaggttaaagagattgaaggtcagcgaatcctgagcaaaattaaagataaggagtacgtgtatgtgactgcaattaaaggaaagcagcgcagcagcgaagagttcgctaaagagattcaggatctcgcaacttatggtcattcagacattacgtttgtcattggtggcagtttagggactagcgatgctgtaaacaagaggggaaatgacttgattagttttggtaaattgacgatgccacaccagttgatgcgcgtggtgttgattgaacaaatctatcgtgcatttatgattaactcaggtagtccttatcataagtagaatatagaaaaagcccataaattgggctttttatttttgcatatttgcagatttcacaagcatattgaaaaaaactgtggcaggtcagtgcttttttagttttttatgatttaaaaatagattttgttaaattatgtttggcaacaaaaaagacgatctttcgatcgccctgataatttttgagctaccagctagtagctcacgcacacgctgaagtgtactttatctttgtagtatctcaattttaacacataaatggtaaaattaaaactgcacgctgaagggggtaagtgtcaatgtttttgcggtagcctttaaaccattagtctaaccttaatttcttaaatatttatatgacttaaatttctgcttagcttgcttaaataactattgccagctacctgtgcggttaatgcgccatgctggatgcctaaatgaacttcatgacgcttctttaagctgtcacgggccgctgcttttaattcctgttcagtcaatacagttatttctgaatcttcaaactcgctgctaagccaaaattccagctctcgattcttgatgcagcttaagatcctaagcatgccttctgctccagattttgaccatttcttgccttgccccttaacacggtaggtatacttgcggtggttgctctcgcagcagccaatggctttagtcacagtcagttttcgtttcttaaacggcttaatatcgtcccaatgacgatcaatataattccttaggcgccccagataatcatgattgagctcggtattcaattcatcaattagtcggctttctgcagtggttaggatagttttaactttgtcatagctgtatttgtattccaaagcagaaatcagcttgccttgcaggtcaggcgcaaaatatagcctttctttgattttcttatttaggtgaaagacatccaagaaatgctcatgacgcttgcatagccctacaatgtcatcgaagtctgttttggcatatccagcaccgccatcggcgttgctaagaattacagtatcagaaagatcataagtattggccaggtactccttggcttcgttcagcgcatcaagtcggcttaaagaaacaaattccttggcattgattcgctttctgcgtttcttgcttatattgacaatgccttcacagacctgatagcgatgaaattccaaccggcttttagtgcctttgatcaccacgccatcgccttcaagatacaaaactgggacctttttcttagtgcctgcggcatcatatcttgaatctgcttcttggcccgctttaatatttttcccggccatttttaccaaattgcccacctgcatatggctaatattaaagccagacaggcaattgactgctagagcagtattgcgataagtggcaacgctgcttacttctaagatgtttttgactgctaaaatactgtagcgcttgtatttgtcaaagcccattaattcatccaagggataccttgcttgtttgcctgggcagacatatcttcttctgacatacctaacttcgccaaaagccatattgattgagcgctcattcttcttatcaatctgatagccctgtgctttaaccttggtaatcatttcatcatcaactttagctaaagccaaggccatgatttccttaatcaggtttaagaagaaacagattatttttctttcacgcttaatataattatcttcagactttataatatttgcgatttcagttacaattgaattcataaaagaccagcttctaatgtgttttttgttcttaacatcagactactggtctttttgtttgagctcaagtccaaattcaaaggacttgggcttttttaattatttattcaacttaccgtaaaaaattatacacttagctgaaggggtagcgcccttactcgtgtggaaggaggtagactcaatacagccgtccttcggggcggctttttttatgatgaaaatggcaagtcattgggtgaaaagtattacgcatatcgtgcagtaactgtaaatcaaagtcccataacaattaatggcgctaaattctacaagttggctgatagggatgcttatattaaggtgaccaatattagtggtcaaggtcgcgttttaaagcgtaacgcctacatctacagtacatcaaaaaaaacgcactacgcataacggtgcttggaagttgtacaaaggctccacagtgacaacttacggtggttcatacaagtttaagaatggcaaacgctattacagaattggcggacctgctaagcaatatgtaagaacatcaaactttaattagaagttgaatatcatttacgacagcaacataatagttgctgtttttttgcctcaaaaaccatagaaaatcttctgtaatcaaggtaaaatgaaattgattttacaaatatcatggaggatgttggaatgagaaaacgatggacagcagctgttattgctgctttagttgccgtaagtactgccgcaactactgttaaggctgacgatactaacacaacagctaatactaatgagacgcaagtaactgcaactagtgaccaaactaattctgattcagataaggttacttataacaaggcagattatttgtctgctaaccctaaattagtgcgaattaagcatgcaactactgcttataaggatgctgcattgactaaatcagcacagagcgtaaaagcaggatcacactttttaattagtcgaattgttaaatctgacaaccaagtaccaatactaaagactagtgatggcttgtatttgcctgctaaaaaatctttggtaactaaggtcatagcctaccaaaatcctaagggttatcatcaagtacattacacacaagttaaaccatacggtaaggtgggttataacttgtaccgtggctatgagggtattaagacttggaaagtaatgcatagagttggtacttgggcaggtacgaattactataaccaagctacttataacgcagtaaagaacttccaacgtagtcaccacttgccagcaactggtaatgttaacttagctacttgggaaaagatgggcttttctaagaagtcatggtatagcattgatagttatgttgccccacttaaggcttatgcttggcaagggcgtaaagctcatattgaagcaatgattaatcaagcttacaaatatatgggaaaaccatggttagcaggttgttcaactagtccaagctacggtgttgattgttctggtttggtaatgcaaggtctttatgcaggtggcattagtccagttccaactagttcaatcggccacgctcatccaggcaatgaatggaattcacgtaatctttgggctgacaagcacctaaagcgtgttccatattcacaaagacaatgtggagacttagtgttctattaccaaccaggtacgcacactatttggcatgttgcgatttacttaggcaataaccgggtaattgaaagctggccaccacgtgtgatggttcaaccaattgttaattcacaaagaaatgtaattgctggtattaagcgaccatttatttaaggaaaaatatgaaaaaatacttagctattttattagtcagcctgggctttagttcattattgttaactcgccaaacagtacatgccgctgataatgatgatgccgcgacaactaatcaatcggctcctaagtatactggccttaaaaaagttggtaaacattatgtctattttgatcaagcaggcaagcaacgttttaaaaataccaagactaaaaaaacatattattggattaataaaagcggcaagatagttggtattaataactacgccaaggtaattagccaactacctgaaatgccaactggttgtgaaattactgccgtgacaatgatgattaattttgctggtaaaaaggtaactaaacagcaggcggccaagattatgccgcgcagctctaaccctaacaagggctttatcggttcgccttacaagaaatatccgctcggctattgggttgctcctaatggggtgaaaccagtagtgaagcattatcttggtagagcacagaatatgattaattgtggtttgcccgcaattaaggataagctgattaattcacacttggtggttgtttgggtagggatgtttgacggcctctctaaccatgctattaccttgacgggttaccatggtaaaacgatctattataatgatccttggactggaaccaagcggaaaatcaagcaggaaatttttgcaacgcattgggctttagatgctcatcgggcgttgagttattaattttatgtaaatatatttactttttagtcatgttgatcaagccactttcgcagcatttcaacatattcatctgttttttctacaaaagacatgtgaccgcagttttcaaatagctgccatttactgccagcaagctgatcctgcatcgttttagctacataaggtgtacataaatcatcagtcccactcgtaattagagttgggatttttattttgcctagtttttctgtgtattcgtaatcgtgcaagttgccctctggcgtatattcatttggtccccaggcggtttcataagctacaataccaccacatttttttcgcataacgcattcaggccacgttttcgtcatgtcaattgcatgttgattcatgaagtgctcattagcttttaagtaatcaggatcgttaaaattgctagtcaattcggcgcgatgaattgccgcctgttcttcaattggcaagtatttaatcatccggtgtaattctttgctccataaggaagcagacgacaaggttgaagacaagatcaagctttgaatgccaacaggatgataatcacacatgtagattagcgctagcatcccaccccaactttgtcctaataaatgtattttgcgcaaagccaagtgctcccgcaacgccatgagttccttaacccatgtttctttagtataaagttcagggtgatcatcagggatgctactcttgccgcagcctaactggtcgtacatgataatccgtcggttatcaatttcggctaatttgtccaaaacctcaaaataattatgacttgagccgggaccaccatgtagcaatacgagtggtgtcttttcgcttcttcgaccaacaatacgatagtaagtttcatagcccatgaaaggcatttttccttcgataatttccattttttcacctatttgaacaaaaacaatgagatattaaccaaaattagcagggtaaagaagattacccaatctctagctggtaaaggaatagcgatgatcgtcgaccttctttgcccttcgacatagccatgtgattccattccttgggccagattgtcagctgaatttaaagcaacaagaattgctttaaaatagaggaccggcgaccaaaaactgagataaatgccccgcatcatagcgctagttcggatctgtttaaccgccatcttcatctgcggaataatgttaatcgccgccagcacgccgtaggcaaatttactgggtaagtgcaggttctgctctaatgatcgggcaaagtctgtagcggtgttattacgtgtcacgcaggcaatcgtcaaggtataaacatagatacgcgttgacaaattccaagcataataagcatttggtgttggtgaaaaccaaaagagcgttgcaaagattgtaaaagcagcaataaagggcaagataatgagcaagattaactctttgattttgaatcgagtaataattaaataaactagcgcgaaggtgattactaacaaattagtaactaagctagcttttaaagatatttccagggaaataataaatgctaaaagaaattttaaactaggattcataagcttatctttctacatattttaagcgctgatccgcaaaaatcaggtggtaatcgcaaaattcagctagctcgtctatctgatggctaatgataaaaaacgtctggtggagcttttgctggctttctcgcattaattctaaaacgagtttgaccgagttatggtcaagtccactgagcggttcatcaattaataaaacctgatgcttagtcattagcattaatagaatctgtaatttcttctgttggccacctgagagagaataaacaacttggtctaagtgtttggctaaacccaatttatctagccattcattgaccttttcttcagtaaaaaataaatttctatcctttttacttaattctagttcatctttgacagtcacagctaaaaattggtcgcttgctttttgaaaaatttgagctacttgtgttaaatattttctagctgagatttgagcgatttccttatttaaataagcaaaattaccagtatacggaatcattttggtcattactttaaataaagacgtcttgccaacaccattagcaccagtaattagggtagtgccagaatgcaaatttagctcattttgcttaagcaaaagcttgttttgtctaatttggacttgttttaaagtgaaaataggctcactattaggtaagacaaaatgataatgtcgctcatgcaattttttattttgttcaaataaggctatttttttgctagcatttaattcaataacttcttgattatttgtaaactcaaaaagatggtcgcagacaggttcataatcgtctaaaacgtggtcacttaaaataatagtttttccgttgtgagctaaaatcgctaattttttaatcaaaaaagcacgtgtcttaggatcacaactggcaaacggttcatctaagagcaataaatctacatccatagctattaagacagctaaagcaactctttgttgctgaccgcctgatagagtattaatcttttgatcgagaaggtctgcaatttgggtgaaagctgttgcctgatctagtcgtgtttgatactcaccttcatctaactgtaaattttctaaagcaaagacaatttcttcacgtggagttggcattgtaaactgttcagccgcattttggaacatcattgccgccttttgtccgtgcaggtccaccatacctgttagtcgccctgcatatttgggatacaaaccagcgataattttgagtaaggtagatttaccgcagccggtcggtccaattaacagagaaaaaccatggggaatttcaatatttagatgattgataataggttctttttcataagaaaaagtaagattgttaacggttactttcataagcttgattgtacaagatgctttggggactgtctacaggtagagtttgttataagtagaacaaatcataaataatacttaatactaaataaagttttgatttataatgtaattatagtgttaccatattttatttaatttaaggaaggtggacatatggcagctgttgctttggaccaatatctggcaagtgtattaaagtcaaattcaacagataagaatgaaataaagttggaagctggtaatccagattttgatctgtttactatctaccttgaaaatcataatactggtattcatcgctatcggatggatgtttcaacgattttatatattgctaagggtactgtgacaattaagagtggtgaaaagatcattcaaatgaagtctgggaatgttttgctactgactgaaggttgcaagtatgagattttaagtcaaaaacctgatacggtactgataaagttgaagtttaagcgtggatttctatatcgcaagtattttaaagattttagctgtaagggagaacgtgaggttaaagttattgagcaaatcgttgatagcttagaaaatgaacatgttctttggctaaaaaataatcaaattactcgtgcttctcaagtgatgcaacatattattggcggttatttgaataatgatttgtttactaaagctttaattcaggctgagttgaccactatgttgattatttcaattagaactcagcgcatggcaacaccgactagtttggataaaactaagtttgaaaagaagaccttagataattacatcgatcttcattttgccgatgtctctttatctgacgctgcaaaatactttggcttcaatcctaattatttctctaatatggttaaggctaagactggcaagagttttgtggatcacgtggatgatcgaagaatgcaagaagcgcgtgaattgctggctcagcctgatatttcacttagagagattattggtcgagtcggatattcgagtaagtctttcttttataagaaatttaatcaatactaccacataacaccagcagcgatgcgggcagaattgtttagacaagcaaatatcaatttaaagtaaaaaaataatctggacgaaagttccagattattttttacatattttctaagcgtttaatgcggtctgctgttggtgggtgagtatcaaacaagtgcgtcaaaccgtgattgtggaatggattttcaatatataatccagcactactactatcagctactttcattggttggctattttcaatcttgcgtaaggcagaaattaagccttgcggattacgtgttaatttaactgaagatgcatcagctaggtattcacggttacgcgataaagccatttgggctagggatgcagaaagtgggcctaagatcaacacaaagaccaaggcaaccactttaaaaattatggctaaagcattactgtcacggtcatcgtcgtcatcactgcgcacgccgccccagaaccaaaaattggacgccatattagagataaaagaaatgaccccaactaataccacggcaattgttgaaagtaaaatatcgtagtttttcacgtgtgataattcatgccctaagacgccttcgagttcttcacgatcaagtaattctaaaattccttgagtaactgccaccgcactatgttcagggtcccgaccagttgcaaaagcattgggactaggatcaggaataatatagacccgtggcattggaacctgtgccaccatcgccatatcttctacgatatgccacagttccggattgtcggcttcatgaatttcttgcgcgtgattcaagctcataatcatgttggctggattttgccacatgatgaataagtagactaaactaccgatcaaagcaatagtaacgcccattgttggactattgctccaaagataaccgattcccgcaccaactaagcctaagatcaccaaaaagatgaacataattaacgccgttttgcgtttattacgagcaatttgttggtaaagcatggttaaacttccttaaaattaaaacttaacttgaggcacattcttttcttcactaggagtttctaagtagttaatcttagtaaagtggtgccacttggcaacaatatttgatgggaaagtaagcaacttttgatcatatgttgctacagttgaattataaagttgacgagagtaagcgatcttgttttcagtgttagtcaattcttcttgcaattttaagaagttttgattagctttcaagtctgggtaggcttcagccaaagcaaaaattgacttcagagaatcagtaatttggttagaaagcttcatcgcttcttcatggttaccttgaggcacattaaccaattgattacgtaatttgactacttcctcaaaagttgatttttcatgcttggcatagcctttggtggtttcaaccaagttgggaattaagtcattccggcgcttaagttgaacgtcaatttgactccaagcttcttcagcatagactttcgctctttgtaaaccgttgtaagttactatgtagatagccacgattaaaacaataatagctaaaatgatccaaattaaaggtgacatagtttttcctccataaaatatttatttaattttatcgttttcgaatttcttgagcaataaaaaagaatgtcaaagcggcattcttaacaaaaaatattaaattctgaagattaatagtaataatccaactgcagttaaaataatcaaaccagcaaattgcataatagtccattgaataaaaaactttttcttacttacgctaccgtgttggttgaaagtcttaagaactaacatattagccattgaaccgatagcggaaccaaaaccaccaatgtttgaacccaagaataatgcttgagcataagtggtaaatttaccaactaaaatggttgatggtacattgctcattacctgactagagataattgaagcaaagtaagttgaaatttcagaataaacggtgccatgaattagatttacgataagagggatttgttggatatcgctgatgaagatgaagaagccggtaaaggtaagaagtaaggcatagtcgattttgagcataatcctaggattaattgcaagggctaatgcaaccgacgttagcatttgccaaataatatcaatggttctgaaaacaccaaagaagaagaaaataaagacagcagtagttatcagcgtcgggcgccagctgatcttgattggctcagctttttgcaccggaatttcttctttaggaataaacagaaagactaatcccatgattagcattgaaactactagataaggtacagaccattcgaaaaattttaatgggctgacatcaaagcggctgactgagaaaatattgtgggggttgccccaaggcgtaaatgctgccccaatatttgcgcccatcccaatcaaggtaacaggcaaaatctgtggcaatttataacgcttagcaatatttaaatacagtgggatcaaggtcaatgcagtaatgtcattacctaaaaacatccccgaaatgacagccaacaacgaaaacagcgtgttcaacttacgcgtattatcggcaatacttgtaagcttgtacgctaaaacatccagaacatgcaagtatgcatagatctggataatcgttaacatcgcggcaacagaccataatgtatggaagttaatgtccgcaaaccgcggtctggcaaaaaaaagactgactactgtaatgatcacagtaatctgtaaaattctatctttagcaatattctttaagacggtcataaaaggtcccccttacgtattacaatcgtctaaaaaccctatgtaccattttgagcctttttgttattgcatgcaatgataaatttaaaaaaatatcaagattagcggtatttttgagcatatttttagttagttggaactagtcgtgctatacttaaataagtaagttaataaaatttagattgaaacgaggaaacaaaatgacagagaatgcaatttcaatcaatattaaaccagatgctgcagaaatgattaaaagcaagatggatgcagatcaccaaattgttatcttggctttagatgatggttcaaccaagtattctaaaaaaggcggcacttgtactattggcgacagcttccagtttgtaatccttgctgaaaaagatcctaagtataatatttcaatcgaaaataatgctggtcttgacttgtatactgctcagccggaaacaactttctttgaaccaggtctagtggtaaatgcacgcaactcaactttgagtttatcttcagacagcggcattattgatggtgggatgaccgttacccaatatgaacctgaagcaattactgctgatgatctaaaaaacggcggtcaatgttaaaaaaataaaattaatcatagggacgagggaatgacctcgtccttttttagtatagaattaagaaagtgatttcaatgtaaggggggaagaacaatgacttttgtcaaagaaataaaagcaggtagtcgtgaattttgccaaaattggctgcggtatctgctactttttatgggattaagtttatttaatcaatttattgttattccactttttcgctatattacaacctttgttttgcaggctagtgctattccgttcgtatcttatcgaaatgtagtgacgatcattacgacgcatacggttgcctttttaattttgataattgagttgctgcttttattagtaatcttgtatgcgcaattagcttatttacttcatggcgtttgggatattaagcatcaagtttttacgtggaaaaatagttttattcaaacttggcaaaatatcaaaaaaattcgtttgggcacgctttttattttgatgctctattttttattggtagtaccgttagccgatgtcatctttagaacaccacttttaagcaaagtgcagatttcagaatttatcttggattatctgacgagaacgccaatcttgttagccgttttgattgcgttttatttagccgctttgatccttggtgcaaggctagtatttgctttacccatcatcgtttttgaccacttaaagtcagtgcaagcagtaaaaagaagttggcgattaacggcgcactaccgttggcggacgatttgctggaggattattgttttagccgttttatctgcagcagtcatgacaattttctatttagcaatgtattgcctgcagctattagttgatttattacctgggaaatgtccgttaattttagccattagcaatctttcgcttgttcaaattattagtgaagtagcgttagtctatgttagtgtactgggcttatctattattttgaaagctttaaggcaagaaaagataagtcaaacaggtaaaactaaaaagataattctaagtacattagttgtgtttgtactagtaatgattaatgcaatatctaccaattatttatatttgactagtgtaaatgctaaagcgccagtaattatttctcatcgcggcgttgatgataaaaatggcgtacaaaacacgttacagtcattaagaaaaacggctaaagaaaagccaaactacgttgaaattgatgttcatgaaactaaggataaaaaatttatcgtaattcatgatgagaatttattgaagctaacgggagttaataaagccccgaatgatttaactttacggcaattagaaaagttaactgccaaagaagacggctatcatgctaagttagttagctttgatcaatatcttgaggaagccaaaagactgcatcaaaaattgctaattgaaattaaaacgacggctaaagattcgaagaaaatgctgcagcgctttaatcaaaaatatggcaaaacgattcttaaaaatgcgtatcaagtacaatcactcgactatcgcgtggttgaaggactgcacttaattaatccacgtttggttgtcttttacattcaaccttataattttacttatccgcaaagtgttgctagtggatattcaatggaatattctaccttgaattcagactttatttggcaagcccatttgcaggatcgtcctgtttatgcctggacagttaatgacgaaaaattaatgaagaagatgatgtatcaacaagttgatggcttaattactgatcgagttgatttagctaaaaaggcaattaaaagtttccaaaaggatgctagttatgctacgcgaatcttaaattatattgttgtcctgcatctgtcgaaaaattttgaatctgcatgaagacttgatctgaagggctggacatggtaaactatactagattttcgaaaatctgaaaggaagtatagcatatgcgtaaaggtgaaaattacaacactggttgtgaaccaaatcaaagacctaagaacaagagaaacgcaaagaagcgtgttgctcacgtagcagcagttgttgctttcttgaacaaggccgcaaaagacgaaaacaagtagtctttaataatattgaaataaaagctaggagctgacgcttctagctttttttgtgcttactgaaaaaattaattctaagtgtataattttttacggtaagttgaataaataattaaaaaagcccaagtcctttgaatttggacttgagctcaaacaaaaagaccagtagtctgatgttaagaacaaaaaacacattagaagctggtcttttatgaattcaattgtaactgaaatcgcaaatattataaagtctgaagataattatattaagcgtgaaagaaaaataatctgtttcttcttaaacctgattaaggaaatcatggccttggctttagctaaagttgatgatgaaatgattaccaaggttaaagcacagcaagctcttagttaaaatcacgccacttaagcgttacccaaaagttacgttagttgtaccagctcataatgaagaattagttattagtaaaactacgcaggcaattttaaatttgaattatccggctgataagttacaaattttaatctatgctgataattgtactgatgatactgctaaaattgcccgggaaataatcaagcaatatcctgaacggaaaatcaatgttcaagtaattgaacgaacaggtagtggtggcaaagctggtgtattaaatgatgctttgaagattgcccaaggagaataccttggtgtatatgatgcagatgccatgccagaagaaaatgctttgtattttttaattaaaaagattttggaaaatccggtgagatataaggctacttttggtcgcaataagacgagaaatgcgcggcagaattttttaactaagtgtatcaatcaggaaattgttgttacccagcgaattcaacactgcggtatctggcaattatttaagattggtcgtattccagggactaactttattattaatactgattatgtcagatcaattggcggctggcgcaatggcgctttgaccgaagatactgatatttcttttaaaattatgggctcaggtagtttgattgccttagcctataattctgaagccttccagcaagaaccagaacgcttaaaagattattatttccagcgcttgcgttgggctaaaggtaactatgaagtggtgatcaataatttttgccatctttttgataaaagcaactggcgggttaaattagagactgtctattattcctgcacttttttctggtttaatttggcgattgttttatcagatctgatctttttttctaatttgattgccttaatcgtccatctttggaatcctgcagtagtaataccatttacaatttcgcggagtaatattttattagctcaaattctgctctttaattggctattgatggttttgctttatattttgcaaattaacctagcgatgactacgcaatatgggcaggcaactgacgaacagatttggctagccttagcatcatattttacttattcgcaattgttcatcattgtatcaattcatgcggttacttcagtaatgctagatcgcgtttttcatcgtgatagtactaaatgggttaagactaagagatttgcggattaggtgatgagatgaaaaaaagatggatgctactaggatttttactcgtaacgattgcatttaccggtattatgatctatatcagagcagataataattcagcggtgcgtaatttttttctacattcttggcataaaaattatgtagttgaagaaaagaatcttgcctatattaataccacgcctaagcaggaacaagtgacggttttatctgaaggccaaggatatgggatgtttattgcggcgcatgatccagcagttaaagaaagcaactttgctaagctagtgcagtattatttaaaacaccgggatcgtaatacgcaattgatggcttggcggcaaacaaagaaaaatggaaaatggagcagtgaacgcaatagcgctactgatggggacttatttattgctaaagctttgtttttagcggctaaaagatggaaaaccccagcatatcagcggcaagggcaaaaattaattgccgatattttgcgttatgaatataatccgacaacgcacgctttaacggtgggcaattgggccgattctaagtcgaagtattataatttaatgcggacttcagatgtattgccgacaatgtttgatcaattttatcgtgaaagcaatgattcgcggtggctcttaattaaaaaaacaatgctcaagcggctcaatcagttgagtcaccagcataagagtggcctagttccagactttgcctggctgacatcaaaagatgctaagccagttaaaggaagggttaccactgatcgatatgatggtgattattatgccaatgcttgccgggtgccaatggatttagcatttagtaaggataaattagcaaagaatactgtacatcgcttgcttaaattttttagcaagcaaaatacaattacagcaggctatactttaaaaggcaagccggtcaataattatcaatcagctagctttagcgcgccaatttatattgcggtgaatgaaaatcgcaatcaaggctatgataatttgtttgcttcgcagcaatatatttttgctaaaaaattacctaaaaataattactatgatgcagcactaacgacgatggcaacgatactgacaccggcgcatagattttaagaggcaaaggcctctttttatttgcattgaaaatcaatctttgataacatagtaaaaattttaaggaaaatgaggaggacaaaaaatgggattaaatgcatacattcaaggttttaacagtttagagtcaattgatcgagcaccgggctacttcaagtatcatcaccactcagtagctgaccactgcttcagaacagcggaattagcacaaatgatgggagatattgaagaagtaaagggcaaaaagaagatcaactggaaggctttatatgaaaagagcttgaatcacgattatactgaacgtttcatcggtgatattaagacacctgttaaatacgctactcctcaacttagaaagatgattggtgacgttgaagaaacaatgaccactaagttcattaaggatgagattccagaagaatttcaagaaatttatactaaacgtctctcagaaggcaaagatgatactttagagggtaaaattttatcaatctgtgataaattagatttgttatatgaagcttatggagaaatcgaattaggtaatcctaacccggtttatatgcaaatgttcaaggaaagtcttgaaacgatcaagaagttcgacgatttagtttgcgtacaatactttattaagaaaattttgccagatctttttaaaggtgatttcgcgggaaaggataagatgcaacgaatagcttttagcattctattgttaggggatgattaggtgaaatttcaatgtagttcatgcgggctgcgcatggactctttgcattttaagcaagaggggttaatgaatcctaagttgaccagtatttgcgacatttgtatcacgcgcaacctgaatccagaagattacgcaaatgatgcggtcgcagcttttgctcaaagcttgctttacacgtttgtcggtgcaaagaaacaagatcaatcaggttttattgtgaaaaataaaaaggaccgtaaaaaatacgaggcctttttacaagattatgatggcaatgaaatcgcccgccaacagattaaaaggtctgatttgaatttggcggtaattaaaagcgaagatggcaagcttaattatgtgcctaaccaaggcgtaacttttgagcaaaatttaaagggaatgggtttggagatcaatttccagttaaacgaagttgattttattgatcgtgaacgcattcgggccaagtataaataccgctgccaatattgcggcagacgtggccacagcgtagatcataaggatcccgtttctcttagtcacaacaacagcttagataatttaactttagcttgtgcggaatgcaaccgaattaagtcggatatgccttataagttgtttattcaactgaatgatcaaatttctgagatcaataaaaagctagttaagtatgaagatgcgctgggtactttgagagaagaatttgagcatcgtcggcgctatttagcggctcaagtacaccttaagggtgttatcaatgatcctgagctaaatgcgattagaaagcaaaataagagcttacaggatgacattgatagtttacaaagtgattatgatgatttgcgtcaaacgcgcaagacgtattttgatacgggctggaaattagctcgcattaaggaaaataaggatattatttaaaacgtaaaaaagcgctattttttgtaaactcaattcaaaataaaaaatgagttttaaaaagatcatccccatataggcaatgtcattaagttaagacattgacaaattatcgacttggacttttaagatcattcatttgcgatttatcgcatttgaatgctcttttttcatgccaaataaacccaaatcttgtttagaaattaggctacacgatataaataatatacagctgatttgggtttgagatttcttttgtcttttcgtcctggtctgatcggaattgtgtaatgactaatttgaataagaatctttttaaagatttcagttgaagaagaaattatatacatagcctggatgacaaaacatgactgtttgaaattgatcgcatattgatacttgcattttttttgtggtacatatgcttgagcatcaatttgactgactgcgttaaacataatcatgtgggcatagatctccatttcaataaatctatcctgcttggaatgaaactgtacgctacctaaagcatatttcaactttttgaatgaagtttcaatgccccagcgcaaatggtagatttctttgatcctttttaagggataatcggctctatttagattagttagaacaacttcccattcttctttgcctgatttaggatcattaattctaaatttacaggcacgaaattttattgtacataactctccaaagtcccagctgccatctttggtatttttagaccgatattttatatattgacggtaatgatggttaaccaaatgaacgttttctgtagccttatgggtttcataataataattagaggtagtcacccagcaagctatatccttatcacactcttgattaggcaactcagctacttccttaaatgcgccatatcccgttttagtacgtatgacataataacagttaggcaggcgattacaattttcaatcatgttaaagccggtataacctcgatccatagtaactatatatggtccgcaatttagctttttaagcatttgaacggcggctttacgttcatccatctttgacttaggctgaaagatgcagtcttgataagtattatttaacaggtcatagagtgcattaacatgaatttggcaatatggctttcctttatgattgagatttccaacgatattctctgatttaggattccagatttgattaaaatcagacccatcaatggcaaatatacgatatttatgatcaaataactggatattaaataaattctgattaaatacagttagaatatgcttaaaacatgcgggtgaaagctgacctttgcgttggacataagcggaagtactgactactttatcgttatttttaatagctttttggccaaaagctctaaacaactcactggtcaaatcttttccttgcatattaatagtagttttaatgactgtagctgcatctaaaaaccgcttcctagtgaaggcatgaggatcatcgataaaatcatgaatatgctttccagtatcattgataatttgatcaagacgatctaaaatatttctgtgaagggctttcataattaacaccagctttctggcaataattttgaaggtttaataatttaatcagagggcgaaaaggtaggttcttttcgcctttattttatgcaaaaaaagaaccaaatcataatgattcggttctacagagattagattcaatttgtcaatgtcttaacttaatgacattgcccatataggaatgatctttttaatttttatctatctaattcgatcttctggatcaaataaatatttgtcccatttaacttcattttgaacagtagggtggaagagcaagaatgctagcaacagttgaccaacgtaaggaattacgcccagccaccaccaaccaccgttaaagcctgcgtcgtgcagacgacgaacagtgtgacctaattgtgctaaaaaggcccaaatagctgctgcaataaagaaaataataaaaatgatgaagattacaccgattaccttggcatcgccagaatcaaattcagtaacgctgaaaggagctaaaagcatgaaagcaagtaggtaacaagcaaatacgccgattgtcatgataacttggctaattgcagtacctacccagaatgaggttctagtagatctagcatcccacttaaagcagtcaaagaagtgttccttcaagatttgaccaatagttggtacaggaacattactttttgcgccacccttaggataatcttgatcgctgaacaagtatttgccccacttaacttggcgttgaacagatggctgcaattcaagataaaataaaaacattgcgccataaccagtgaaggcagcccagtaccaatagccgctgtagccaacatcgtgcaaacgtcggatcgtttgtcctaatgcagctaaaaatagccacagataaacaacagccgcaacaataccatcgactattctaatgccggggttgatgttttggttaaaagcatagaagccaagaaggatgcataagatgccgataacaagattaatcaaagtgctccaccagaaagatttacgcgtagttcttgctttccagttgaagggatgcaaataagcctcgttcaaaatttgcgcaaaactttctgcaggcggcagtggcagactttcgtcataaggcttgataaaataatatactctatcattcattttacttcctccaaaaattaatttgttataaattatacgctaaaaaagccgtgaagcaattaaacttcgcggcttttttgatattagaattcattatttctaaagttgctcaagaacttttgcgtcttttcattcttaggatggtcgaataattcttccggtgaaccttgttcagtaatgataccgtcactgatgaacaatacgcgatcagaaatactcttggcaaagcccatttcgtgggtaacgatcaccatcgtcaaaccggttgtagcaagcttttgcataacgtctagtacttcgccaaccatttctgggtcaagggcactagttggttcgtcgaacaataaaacttctggattcattgaaatcgcacgggcaatagctacacgctgctgctgaccaccagataattgttgtggcttagccttaatgaaaggatccatgccaaccttttctaggtttttcatggcaatcttgcgtgcttcatctttagaacgtttcaagactaattcttgaccgaccatgcagttttctaaaacatttttattttcgaatagatcaaactgttggaaaaccataccaacctttgatctaaaggtattgcggttatagccgggatgcaagatatttttaccgtgaaaatcgatctcgccgccagttggttcttcaagcaggttgatacaacgcaaagtagttgatttaccaccaccagaaggaccaatgatcgttacgatttcgcctttattgatgtcaaaggaaatatcctttaatacttggtgatttccataagacttttgcatgtgctttaagcttaaaattacttcgtttgattcagtcattaattatttgcctccgcatcttttggagtaccaacttggacttggttagccatcaagttgtaattcttattaccttcaagtctcttttcgataaagttgaagattctagtaatagtaaaggttaagatcaagtaaattgctgaaatcattaagtaagttgggaagaacttgaatgattgactggcaatagtagtaccaacgaagaacaattcagaaactgagatgatactcaatactgaagtatccttgatgttaacgataaattcgttggtgattgatggtaaacagtttctaatagcttgaggcaagatgatatgccacattctttggttgtgggtcataccaagtgcactagctgcttcgaattgaccttctggagttgaaataataccaccacggataacctcagctaagtaagcaccagtgttaattgacacaataatcaaagcagctacagttctatttaaattcaagtgccagaattgggcaataccatagtagattacggctgcttgaaccatcattggtgtaccacggaagatttctacataaacagataataaccacttaactacgttcaaagtccaacgcttgccgcgagtagttggagtaggaatggtacgaataattcctacaagcaagccgataaagaaaccaacaatggtaccaactaaagctaaaagcaaggtcatgccaatacctgacataatcatgccaccatattgcttccaagtagtaactagccagttttctttcttagtttcgttaccagccttaggttgttccttgatggcttgtgacattaattgatcacgctttttattagaaatagttcttaaagtagcgttaacttcatttaaaagcttggtattaccctttttaaccccgatactagttacggaatcgtcatggtcaactttgaagccagccattttgtttaagttaactgcaataatgttagggttaacgttgtggtaactttcaaattcaatatcttcagcaacataaccatcaatggtgccagaagctaaactttgacgcatggctgaaaagtcacgcatagctggttctcttttagcaccttttaattgcttgattaaatcgtagtgcaaagttccttgttgtgcggttaacttggcacctttgaaatcagtcaacttcttagcattagaatatttacttgccttattagtaattacgacgaaagtacttttacgataaggttctgagaaattaattgccttgcgtctttcggcagtaggagacataccagcaataatcaagtcgattttgcctgatgtcaaagctggcaatagaccatcccattgagtcttttctacgattacttttttgtgtagtcgtttaccgatgatcttggcaatttgaacatcataaccattagcataggagttagaatcatcaattggaacagctccattagctttggttggctgagtccagttgtatggaggatagtttgcctccatacctatttttaacgtgccagaatctttcttagcagcttgagtctgattgctactaagagaaaaaccgataaataaactgagtaggacagacattattacagccatccatctaaatcttgacttcaattataaaacctccaaaaatagttttaacataaagccaacacaataaagagtaaacaaaaacctcgctcttccaaagaattgcgagggtcataatcatcagtgtttaaaccaaatcttatagcgctccctgggaactaaccaggacagtctatagaatattcttctatagcccaacagattaacacgcgaatattaaatctatttcggcggcaaccctaagttaactatcattgttttcgcgaactcaaacttaacttgtgattgtcgcaacctctattgcattggaaaaatatttaactaatgaagaatactagaagaaaaagttaaatttgtcaagcccaaccattattagtttcataatttctctttttcatatcagaaacataaggatttcctgctacataaaaacgtaattttttgttagcccaaacgggatcagattgattgataccaacacgcgctgcagcaattatttcctggggaatttttttatgacgatcatcaagatcaatggcgaaaggggagtctgataaaaagtgcaaattccaatttttatcatgaataccaaaagcttgcatcatttttgcgggaccattagtcaaaagaacgccatctttaccatgacggttcttgatcatggtctcaattcctaaagtgggatcgattgcacggattaaaacaccctgtggttcattctgaaccctagtggcaacatcaaagaaaaaatattgacgttgcgcgtagatatagatcgttccgcctttgccgtaaagtccttcattcgctgggctacgacgaccgccataagaatgtgcagcgcgatcctttttacccatatatgcttctgcttccacgatatagccgcctaatttttcttgaccattatcaaaagtaagcattcgcccaattaggtcttttgcaatataatcggtagtgttagtagaaaaataagttgaataattcatttttgacctttctagaaaagagataaaaaataatgacagaaattaaattagttcgaatttatgaccatgagcaacctgctggttatcggattttagttgaccgtttatggccacggggaatgagcaaagttaaggccgatttagctgaatgggataaacaaattggccctagtaaggaattgcgtcagtggtttaatcatgaagatgaaaaattccctaagtttaagcaaaagtatattgaagaacttaatcataatgattatacagcggaatttttgcaagatgtaaagaagcatttggctaaagaagatgttcttttcttatttggtgccaaaaataaagagcacaaccaagcagttgtactcaaagaatatgtattaaatacgctaaacagttaaatatgtttgtgaccgtgttttttaactttccaaaagtggaagagaattgtcaaaattaagatcgcaaagacaataattgcaaaaacggtgtttggcaactcaaatctcaatggtggcagagctagtagcaattttaaagcgatgattcctatcaataagtaagccattggctgcaattctggaataatatccattaatttaatgataatttcggcaactcctctcatacagagaatgccgatcatgccaccgattaaaacaacaacggggttatcagacacggctaaagcagctaaaacagaatcaattgaaaagacgatatccattgattcaattgaaataaccgtacgccagaaaagagatagcacatgtctctttttctttttgcctttgtggcgagctgcttcgcgctcttctttttctttctcatgttcggcagcttgtttagggtggcgttgatcatagaagaatttaaaggctaggtaaaaaagataaatactaccagctaatttaatctcccaaaagttgatcagataagtcccgattccgataacaataaagcggaataaataagcaccccacaagccataaaccaaggacttgcgttgttcagctttattaggtagcacctgtgtctgtgcggccaaaacgacagcattgtcgactgataacaagcattccatcaagattaaagtcagaatgatcatccagtctttgccactggttaggacatgtaaccagttattgccgtcaaaaaagggtgcatatagtttaagaattgacatgtagttgcttcttttctaatttaattaatctgattttttctttttgtcccagacgataagtcccaactttattgttggataaaataactctttggtcaggaataaaaatcaaaacagggtttaatgctacggcgtgtgcaactgagcgagaagatgtggcttcggctagtgaattggcgacgtcaccataagttaacgtcacaccataaggaatatgctggacaacggctaatacctttcgttgaaattcagtgccgaattccgaaatatcaataggaacatcaaaattctttctgataccagcaaaatattcctttaattgtttgatatgaggtgccatctttttagggtcccgcaccaacatgcggtgagggtagaagctaaaaataggtgaaacagtttcatctcctttaagtccgacgtaagttaggccggcttctgaagctgttaaaaagtaggtccatggctcaattgtaacgtaatcatagtaaaaaaactctgtcatgtgtaacatctttattaaaaataattagtctaagaataacaaactaggaaagttaattcaaattctggaatgctgttaatgcatccccaattatttgcgtgacaccaggggtaggaatttctgtcttgttgatagagtaaattttggcgtcttctttgcgataagccaagagctgggcaaaaggataaactacaaaactcgtcccacaaatgatgatcaagtctgatttttgcattatttcaacggactggtttaatactttcggatcaatgccttcgccgtataacacaataccggggcgaataattccgccacaatctttgtgtaaatagcttttagcatattcttcataagaaacaggttgatgacatttagtacaataaatattatataaattgccatgaaattctgttacatgttgattgccagccttagtatccaaagtatcgatattttgggtaattaaattacctttttcattacaaaaatgggcgattttttcatggattaagtttggtttagcagtaggaaagtacatattgttcatgacaaattcatggaaaaattcaggtcgattgaatagcgtactatcgctcagtatagtttcgggactttcttgcacgccatcatagattccgtttttagagcggtagtcagggatacctgagtgggtagaaacaccagctccagttaagaatacaatatgttgggcattattaatatctgtttgtaattctgctaaatccatcatataatgtcaccctccgtgaaagtcactactttaattataaatcattgttttgttataatgactgaaaattgaaagcaccaaaatcaagctcaagtcctgtcactattgagctttcttagacgtaattagtttttatatgatctgtttcagtgcaatttgtatgaatcgtggcagttggttaataaagtcattgattacttcatctatcttttcaaaactattctgtttaagctcttttaattctgaaattaagtagaccaatgcatctacgaatctaatatcaggtaaggattcgttcattagatagaataaatctccgattgtcttatcatctgtattttgtctttcctgccaggtcaatagatcataagttattgctgtaactgcgatatagccacattggccatcatagctttgaacttgagatttatctaaagcaagatattgcttagacgtcttaaaatatgtttcaatttgccatctacgaccataaagttggatgatttcttcagggctaagctttgtctgagtagtagctaaaaccaaatacttgttcttgtttccacggttggagacaaagacgagctttaataaaaagctatgtccatgatattgagcctcaactatgcttgaataaagataatgtttctttttacggatgtttgaagcagccaaacgatcatacaagtctttaacgctatagcggcgatggcgataaatgtaataaatctttgaactcttcttgatcatgccaagtccatctaaaccgatcttctttaaaatccaaaacattcttggagaagaaaaccaagaatcgaataagacgtatttagcttctactcctaatcgtaaggcttgtctaatcaactctacagttacatcattcatctttctctgagcttgatttctccttttaccagaaattgaacgttcatcagcagtaatgggagcagctccaatcatatttttcttggttttggttgacatcaaggcaaagttaaccggcaagaaggtattgccatcgctccagcctaaagttaaaccacgatatccgttccaatactcatgcttgtcatggtcatagactttagctagcaattcggtctttttagaaaaagaccgagccatcagcgtatcgtcaacgataaaagcaagtcggcgtcttttatcgataaatggttttaagcagccaatgagccgggctgcaatcaagcataatagtttttgccagttgattcttccatcgttaagtacattgcgagcagttctaacggaaaaacgtttgtcatccttagctctgaataaagaaagccgagcaaaatgtactgacatcagccaagagataatcatggttaatgaaacggtggatttacgcttaaaattgacttgtttagttaacttagctagaccaattagattaataaatgaagaaattaaggatttagtatcattttctgtgtcgatttgttctatactgttcattgcgcaggatctcctttactttttaggtcgacacttaaagtataacgcagagagagcctgcgtttttatttttgataagaaaaagccaagaggcgcggggaaggagcgttaatcttagctttcaagtttcagtataatgattaaaataactaaattgaggggatttttatgaaatatatgacgtatttttatgtagcaattgatattttattagtagtttatgcttgttatagttggtattggcaagctaaagttgattttcgtggtcgctatcgtatctcctcagttgtttgggcgctaatttttatctggctgggctttacatggaattacattgaaaaaggtgatccaggcctgagcgtcttcttggctctttttatcttaattagtattgtcgatggtttttcaggatttagtaaaaagcggatggtcgtttcaggctacttcaagcgtacagttaagtatgatgatttagccagcgctactttaatccagatccccaaccaagagaagccattagtgatggcgatttttcgaactagcgatggtaaggcttatatgatgcgctttaataatgaagttaatagcgtaattaagcaattacaagaatatgctggtcgagaaattcctgtcgaagttcaatcaatgatgtaattacaaaattggagaaagcattcgcgagaatgcctgcaaagtccgcaatgcgcgactttgcttttttatttcttccttagttagtaaatgcgagtgtttcatatcttcttcaaaagctgccaccattttctggttgaactttttatcataaaaaacggcattatcttcaaagtttaagttgtaagaacggaaatcttgattcattgaaccaactgaagaaaaatggtcgtcgacaatcgtcgttttggcatgtaaaaagccatcttcgtagatataaattttgacacccaagcgagttaattcgttggcataccactgtgtggcgcgataaataaaggggtggtctggcttacatgggatcataattcgtacgtcaacacccgatgaggcaattgtttgccacgtagcaaaaacggcatcatcagggattaagtatggtgtttgaatccataaccgtttgcgtgccaaaagcattagccgcatcataccgttacgcatatatggtgcataacgatcaggcccgtctgaaatgatttgcgttgcaacgtcgccttcgtggatgtttttttcatcaagatcaggaaatagagtggaattgaaacgtatgagctgttgattattagtgatagaggcattccagtccatgacgaaacgctcttgcaaaagcagagaggcagaaccaacaattcttacctgactatcacgccaatgaccaaacttcttttttttgcctaaatattgatcaccaatattaaaaccgccagtccaagaaattcgcccgtcgatgacaacaatcttgcggtgcaagtggtagttaatgcggtaacgggtgatcatgttgcgtgaagtgacaaaaggcaaaacttccccgccagctgcccgcaattgatcgaaccatgctttagtagctcccattgaaccccaggcatcataaattacgcgtactttaactccttgttttgcttttttaatcaatagttgcaaaacacgattgccgatattgtcgctataaaaagtgtagaactcaacattgattatttccttagctcgtaccatgtccttaagcatgtcatgaaagaaggtttcaccttcggtatagagcttgacctgattatttttagttaggggagcttcttgttgatggttaaaaaagttaattgctatattaccagcctttgaagtgtcagaaggactagtatttttaggtgctttagcaatcgatttttgaacatttctcaagccaatgtgtttttgcttattgatggcaaaaatattttcctgggaaataccccgaccaaagaaggcataaagagtaatcccgactactggtaatactaacaggatgattaaccaagcccaagtggttgaaacggatcttctacggtggaagacaacgtagaaggctaagattgtgttggtaatgataatgattctaacaaagtcatgccaccagatcataaactcctccaaaattaaactacttttttaatttaagaaacttgtcaataatatcgattacaaacggattgtcatgcatccaactatgttcggcgtcatctttaccgcgtacttctacttcttgataaaaatgtgcttttggggcaacgatatagcgaatgctttttgcggaaacaacagagatgaatttatcagtatttgtgttatctaaaacgttgccataaatattcaagaccgagatatcaggattgaatttgcgccgattaaaaaacaaataaaggtagtgcgggttcatgacactaggccgaccactttcggtcaaatagttgacgtttgggatatcgcccaagtaagtgaccccgtcaaaaggaccagcgataaaggcacatttttttaaatgtgggaacgttttgctgcggtagtgcttcatttcagtgcgaataatacatggacaggctaatgaatgagcgactgcaatatagtttttaaaaccatatcttttagctaaaaagggcaggacgaagttgagataatagtcgatgccatagataccgactattcgctggcgaaaagcaacctgcacgataggatgcttgtcactagtccaagttccttctaatttgaaatttcctaataaatcaacggttacctttaaaaacttgggattgcccttgtcataagtagcgtgtttcaccatcacgcgagtggtataatcaccgccgcgaaagccatggaaataaataatgggtacttgttttagatcgcttttttcaatgtttgccttattttcaatatggcgcttgtgtaatttgaggaaaattcgcgtgggagcgaaggtggccatcagccccaaagaaatcatgttaaacatgctaggttcttcttggaggtcatgtttatgatctttttcaacttcttcagcatatttttttgtgttgaaaaacatttttaccaccttctctttcttttttcctataataaaagttatgcaataagtatattttaccattgggtaaagattttggaattttagaggtagaaatgaagttttatgcagtcaaaaaaggacgtactccgggaatatatcggacttgggatgcagccaaagaacaagttgatggcttctctggtgcagaatataagtcatttgaacaaattaccgatgctacagattacttagattggaatgcccaaactcagagcgatgtcctgcaaaaaggtgaagataatttacaaaacgccgtaaaaagggtgcaacaaaagagtcaagaaataaaaaaagcaccgcgaaaaaaggcgaagcagtataaccatgttaatagcaatcctgctgacttctttgcggtgacttatactgatggtggcacgcgcaatactggtgtttataagggcggtcacgttaaaaagaccgataaagcagcctgggcttatttaattgaatgggatgaccagaaagttcatggctccggtggtgaatatggtgctactaacaataagatggagcagacagcattgattaatgcactaaaaaagctgcttgagcttggttttaacgataaacatctattatttgttcttgattcgcagtatgtgttgaatgcgattaataagcattggctacaaggctggaaaaaacgtggttggagacgttcttctggaccattggctaatgtggcggaatggcaggaattagatcggttattaaaggaatttcctgatagtacgtttgaatggacgaaaggtcacgctaataatcgcggtaatgaatttgtcgatcatgaattgaaccgttatatggatcaaaaaatgtaagaaaaaaggctacactgtagccttttttaatttaaaataacgccgccgaacaaaccactaaagaacttaacgatttgatcccacaaattttgtaaccagttgcggttttcttgggtattaaatttattgaagatatttttagctccattttgaatctgactggataatttcgaagcctgttgcttgaagttaccgtccttcaatgcccctgaatcacgaatttcaattagaagattgacaatttgatttttttgattgttgttgatggtgtcacctaagtggttaatattaatttgattgttgacaatgtcgcgaatttgactgtcggtaatgttttgcccttgtttagccatctcattcttggcaccggcaaccgcattgttcaattgagcatctgaataaccttttttgtttttattatcttgggtaatcccagacaaggtattcatttcatcttgagcggcattaacttgcttttgatttaatgcattgccatttttagcataggcagcataaactccagctaatgcccctgaaccatcaattggaatagcgctagtaacataaatgttggcatcgctgatgccggcggtcagggctgcgtttttgtactggttggcagtaatagtcgtgatattatttttaccatcgtagtctaaaattttaacgttgattccgctgcctgagctggtcttttggatcatcgcactggaccaaacaccggatgaagtggtgaaattatcaccagagggatttaaatatttaaccagatctgagccggtaacagtaattgtttgataattaccaccgtttagtggggcggttaaggtctttaatgtgccttgcttttgcgcatcagttaatgatgtacctaaggtaactacaggtgtatcatcatctgctaatactggcttagtaaatgagatcatcgcgaccacgcttaataacattgctgtgagtagtgtgataaatttcttcattttttcttcttttcttcctttttgatcgaatatttattcttgtaatacggaacattatactaaatatttttcaaaagtgaattaaacaacacgtaaaactttcttaatttcgaccttattattgaagatggtataataaagagcaacaaagggggacaatatgttacaagtgcctaagttaaccatcatcatgcctgtttataacacggcgcaatacttgccacgtgcttttgatgctctgcttaatcaagttgacaagagcttcaaattgcttgtagtagatgatggctcaacagataattcggttaaggtagccgaaagctatgccaatcgttttccatattttaaaataattaaaaagaaaaatggcggcccatccgatgcacgtaatgttgggatgcagtatcttgacacaccatatgtcacctttcatgatggtgatgattgggtggatccaggctacacatccttttttattcatgcttttgaaagtcatccagatgtcagcttagtatcatgtggctattggatggattatcctgacaaaaagcaacgcgttgttggtcgaccagaaggtggctatttaacgcgcggtgaaacttatttgaagttgactaatgtctttagctcaccaatgaaaggatatagctggaacaaggcctataaaactgccattattaagaaatatcatttgaagtttgatagggatatttcactactggaagatcagatttttaacgttaaatatatttctgtggctaaaggcgtctactacacgcaaaaaccttattaccactactggcagagaaagggcagtattattcaccagcctaatattaaaaaagttgcggataatttccggggaaattaccgggtttggagcaaaattatcagtacaatgatgaaagaccgcgaggaagaaaagatgcgtaagaagttagagcgacagcaggccttgcgtgatagtgaataggggaaaacatgaaagaaaaagttaatggagtcgaaatttattatcataagttaggtaaaggtgagcctttgcttttactacatggacatcacttagatcgtggtatgtttgataaaattgtggctccgctttctctttattacaccgtttacgtgcttgatatgcggggccacggccttagtgaaggcgacattgcggaacactacaagaccgaagtagaagacgtctatgcctttgttaaacaggttggcattgaaggctgctattgcttcggttttgatgcaggtggtctggtggcaatgatgctagctagaaaacatccaacgatctttaagaagatgattgtagctggcgttttcgttaatggtgcaggcattagaccatatcactacttaacggaaggctttcatcgctttttgagacttgatcgtgacagccgcgtagagttgactgagtcctttatttcagtagatgacttgaagaagattactacgccaactctttgtgtagtaggtgaaaaagactgggttaaggttgagcatgtacgttggtatagccaatttatgcccaatgcgcggttggtgattatgccacggcagacgcatgacagttatgcagtgcgcagtttaaaactgctggatttgattaaaggattttgtaggtaatacgcgtggtgctagttaaatcgttctaggcaatatgccatattataagctaaaatggctatttctagccgctgctgaaagccagctaagctccttgctcggttattttcagcgttatagtaactgagcaaagaaaagtcgctttcaattgttcttctaattgccatcagttgatgattattatgttttttagcacctttcatgttttttcgatatggtgtccaaaggacatagcccataccttttaactcggcagctaagtcttttcctaagtagccttcatcgcctaaaagataatggttaattggatgagcattaatcatcaattctgtcgtttctttggcatcatgcactgatgctttagtgactgcgtagtcaagcaaatagccatcatcgcttactagcgcgtgcaccttgaaaccataataatagactttcttggttgctttatagccaatatcggctatgtcacggaagatcttaacacgataattacgaacaggctgacaaactggaacaggaaaactgtcaataattaaaaattctccagcaacctttacctcttgattccaagcttgacggatgcagcgaattaaaggcaaaagcatcttggctcgacgattaaagcgagaatgagataagccaacaaaaaatttacagaatcttctttgggattcaattccaatttcagtttgccaaatgagcatcgctaagatggagctgtcggaaagctttgtttgatcaatgttttttcgatgcgtaagcttatcaggcgcataaagattatatagtgaacgacaaattacatttaaacgactaaaactaacttgtaaatggtgagagaaacgattaagcttgaggtagttcaattagatcagactcttttctatttaatttacttacaacttgagtctaatccgattggacttttttattaactaaaacgatttaactagcaccacgcgtaggtaatgtggatagtattgctggttaacgtgatagttgctgcagttgctgttatatttggttttcaaaatagggtagaaacattaaatctgttcaatgccggtatagtttttatcacttttgggattgttttacttttaggtgcaattcctgtttatcaagatttcagcacgtcatcaattttaatgttcattgcaggcattttaattattgttagaattattatgctagctgttagtttaattaccaaagtgccaagaacagtaaatctacaggatattgcaatttcattgatgatcgctgcagtttgtttgatatatttcatgcacggtttaaatctgagcttaagtaatttagtcgtgccagaattagcattgattattggcattattttgttttattttaaaagaaagcgtcaataaaattgattgcaaacatggacatctcttcaatagaggtgcctttttgtatataatggtggtgtatacgatttttattcagaagaggtaaataatgaacaaggaagaacttcatcaattattgcacccaatgaaagttattggcttaggtggtaaccctgcattaaatgaaaaaattgcggcaattttacaccaaccattgatcgaaactgcggttcaccactttagcgatggtgaaatccaagttaacattggtgaatctgtcagaggttgtgatgttttcgtaattcaatctatccaagatccagttaacgaaaactttatggaacttgaaattgttttggacgcacttcaacgtgcatcagctcatataattaacgtggttgtaccatacttggcatattcacgttcagataccaagactcgttcacgtgaaccaattaccgctaagttagtggctaacttgcttcaattgactggcatggatcgtttaattactgttgatctacatgcctcacaaattcaaggtttctacaatatccctgttgatcacttacatgccattccacttcttggtcaatacttcttagataacggaattgctaccaaggaagatgatgatatcgttgtagtctcacctgatcactcaggcgctaagcttgctcgtaactttggtcaatacttcaatgcaccgattgcaattgttgatcaaagaggtgctcgctatgatactgaggtccacgacatgattggtgatgttaaggacaaaaagtgtatcatcattgatgatttgattgatacaggttcacgtatttcttcatcaactaagtcagttttggcagctggtgctaagaaagtttacgttgccgcaacccacgcacttctttctaagaatgctactggagtacttaatgaattaccaattgagcaaatcgtagttactgataccattaagcacaagcgctacccagacagaatggtcagaatttccgtagaccaattgcttgctcgtggtatcgattatgtatacaatgatcgttcaatccaccaaatctttgacgaacaaaaccgtttaaagtaaaattcttattgataatttgaataaaaaatgatcctcactatgaggattattttttattcaaaaaatcgggtagataagttataaaactatgtctaaatagtaatgattgatataattgatatgtgttgtatagaaagaaaaagagaaagttagaggaatagactatggcacgacggaaaaacatgaagagacggagagttattctaggtaatactttccatctgatcagagaaaatggaatggataatgtttctttgcaaatgattgcagaaaaatcaggcatttcaaaatccttactgcagtcatactatcctcataaggctaagttaactaacgacattatccgcaatctttttaatactttaggtcaacaagttaataattatgacatggctaatagcaatcttccttatgctagaactaaggcatttatttatacgattgctatcttggggatgcacgatgagggcttggaccgtattatttctgaagcttttgttagcaatgctaccctagataattggggaatcatgcttaatgaatggattaaggaaaatcatttatttgatgacattaacgttgacgaaagcgaacttgagacaggaattgcgtttgtaactagtggtattggccgtctatatcatgatcgcaaaaaacaccatttaacggccgaagctcttgctaactatgcaacaagtgcattgatgttcagtttcttgcattgttcttctgaagaaattgatcaagccttaaaagaaggacatgaaattattgaaactgctgatatggaagttgttcaccgagcaattgatacaatgttcgatgaaggcaaggaaattttcagctaaaggggagtcgccatggttgaaggcaaaagagctgatttgcgacgaatgggttatgagcaaaataaccaatataaacgtttgttggctttcgtcatctttttgattgctgcattatcattgattacagctacttttttaaatccaatctttatgaaaaaacagattaggactagctataatagggcagtagttgttcgccaagtgaataaaaattatgatagcctagctgatttgattaatgcagatagtgaagataattcaaacttactatcggatacgcaaactcaaccaattgccgaccatattattgattattctttgggtattcattggtttaaggttactagtttgccactggctaatcagattttaagcgatatcgatcaaggaattgctaaaggctcgtcaagtggggcacaggaagttaaccgtaaactgaaaaagcagggaactaatgcaccttacgcgattattaaagccttcaatttaagtgtgatcactttaggagcaaatattgctggtttattgtttatcgttaatttgataataattattgttaccattattacaatggtttcgctactcaacgatatgaagtcgcgggctacaattcgaatggtgattcatgatacgatggctgctggcatgtgggcaggtttttggctaattttgatttcaggcttgttagcacttgtgccagtaatctttaatgtcgataatatcgaatttggctttttgcttgagattggcagtagcgtctttttggaatatgtaattgctggggtaattatttacatcatttgtgcgataccatggcaaattacagctgctaaataagaatgagaaaacgtaatctgtagaatgattacgttttttgtttgcacaaagaatcatctttctttataattaaaaaataattaacaaatttcatatgtttatattttaaaagaattgggcgagtttatgaaaaaagctaaaattataaagacttttcttgctttcattactatgctttcgactctttttttgtttaatcagcctgttaatgcagccaataaggaggttgagactggctcagtgatgaaaaaaattaagcagtcgaaagaattagtagtgggcacctcagcggattatccgccactggagtttactaccagtgaaaatggcaataccaaatatgtgggggttgatatcgagttggcaaaagatattgccaaggatttacatgcaaagctagttattaaaaacatgagctttgattcacttttggtagcgctagagacaggcaaggtagacatggttatttcggctatgacacctaatcccgagagaaagaagagcgttgatttttctaagatttattacaagccaagtggcgaatatttcttaattaacaaacgcgatcaggccaaatacaaaaaaattaaagattttgctggtaaaactgtcggtgcgcaaactggtagtattcagtattctttgattcaaaagcaaatgaaacagtctaaggttaaaggcttaggcaaaatcaacaacttagttctggcattaaaatctaataagatctctggcattgtcatggaagaaatgactgctaaggcctaccaacaaaacgacaatagcttgatggctgtgagaagtgacttgcgtgaacaacaagctggtaacgcagtagcaattgctaaaggacaaaatgacttagtagctgctgtgaacaagactattaatcgcgttgaacaaaaagatttgattaataagaaatacttgcctgaagcagctaagtatatgaagacagcgcagaagacgaacacgatgactaaatatattccttactttattaagggagttggctataccatcgtgatcacgattttctcagtgttaatcgggatcatcttagggatgctcttagccttaatgcgtttgtccaagaataaattgctgcactggattgcagtttgctatatcgaattcattcgtggtacgccacaaatggtgcaaattttatttgtttactttggtgttggagcattaatttctaacctgtcagctgttgtagcggggattatcgcaattgggttgaactctggtgcttacgttgcagaagacattcgttctggtattgcttcagtagctaaaggacagactgaggcggctagatcattaggtctttctcaagctaaggcttaccgctatgtaattattcctcaagctttgaaaaatatttggccggcactaggaaacgaatttattaccctgctgaaggacagttcattggtttcagttattggggtaactgaattaatgtaccaaacggaattgattcagacttcgacttaccgtggtgttttacctttattcattgccatgattatttactttatcatgacatttactttaactagattgcttaattatttcgaaagacggatgaaacacaatgactaaaatgatcgatatccaacatttgaagaaaactttcggcaaaaatgaggttctgaaagatatttctgcggaagtagataagggccaggttatctgtattatcgggccatctgggtcaggtaagagtactttcttgcgttgcctgaatgtattagagcgtcctacgactggtaaaattgtttttgatggaacagacttggctagtctaaaggatggtaaggaacttgatcaattgcgggaaaagatgggaatggtttttcagaactttaacctttttcctaatatgaatgtaattgaaaatattaagttggcaccgatgaaagtcaagggtgttagtgaagctcaagctgagaagactggactagtcttacttgaaaaggtgggcttggccgatcgtgcaaaacaatttccagctagtttatcaggtggtcaacagcagcgggtggcgatcgctagagccctagcaatggatccggaagtaatgctatttgatgagcctacaagtgctcttgatcctgaaatggttggcgaagttttgaaaacaatgcaagatttagctaattcgggaatgacaatggtgattgtaactcacgaaatgggatttgctagagaagtagccgatgaggtctggtttatggctgatggctatttacaagaaaaaggcacgccacaggaagtgtttgaacaccctactagtgaacgtgcaaaagatttcttatctaaagttttataatcaaaaaggctcaagcattgcttgggccttttaatttactcatctgtaatgatggggtttgataatacgtactgtcttacgaaaaaattttgatgccatcctttttgaattaatgcattaaaaaaggtgttttgattattaggcaaagcagtggctttgggaatgatgacagcacgtaaaatcttgttttgaagtaaaattggtgattgcacatctgtttcgctatttaaattagtggttgcttgattggtcggcgtgttggttgtatcctgctgaacttgataatttgtagtgtcattagtactatcttgcttaaatagcttgaatctgtacttctgcacgcctttaacgtcaacttcatattcatgtcctgcaactaggttagtatttgcgggtgaataagttaggatcgttctaaaattgccgtagccacaggagctgtaattcttaacatgagctgcagtagtaacaactttagtatctaaatcagtgatagtaattgttggcttatttttaatggttctatctgataaatagagcgaccacatgatatttttcccttgaagcaattcaatagggaaaagacgcatgctaggataagcaactaccggctgactagcaggacgaaaagtatcattaatgtttagtactttttgaacggaatagcggtagccatttgtaccataagctgccccaatgcctgtagtggttaaacgacttgaaagtagccaagctcggtgaccggtatctgaaccagttaaattataatggtcagtaattaagtcagtgatcacatccccagcggtttgctgtgaaacattaaagtttaaatttgaagtttcagaagtgtctttagctagcttccaaacaaatttggagatattgcttggcttagtttcactaggtaaaccatgttggttaatgaatgggttagcattaattgcggccattacagcagccgtaatctgcgcgtttttattaagtgtatcagtagtcgagatagcgggcagactgaacaatgatcgatagtaattgatataatctgtttgcgttttaatgtattttggatctaagcgacctaccttaaattttttgcttagatttggctttttagcataaatatttgcggcactataactagttttatcaaggttcgcatattccttttgaaaattatgaacttcgttaacttcttgtgttgtgaatgtcgctgcttgtgtaacttgtccggcgagggggataaataaagttgcggcagcggcaatagaaaatttccgtagaagcattttagactcccttctatggttgtcagtatacctttcattataaactataaccaatgaaaaggctttagtgaaaaatattccactattttgcgcttttctggtattctttgcgtataattaaagattggaacatttaaaagaggtataaaataatgactaaaaaattacaagttggtttgatttttggtggtaattcatcagaatatgaagtatcaattgtttcaggccgcaacatctataaagcaatcgacaaagataagtttgatgtgcacccaatttggatcactaatgaaggctactttgctaatgaagaagaaagcttcaaggttttagatgatccttcataccaagttaagaacccacataaggttaacaacatttctaacttaattgaattagaaaacttgccagaaattgatgttttcttcccaattgttcacggtaacttaggcgaagacggtgttttacaaggtttgttccgcttgatggataagccattcgtcggtgatgacgtcttaggagccgctgtaacaatggataaggaattcactaagatcttggctcaaagagttggtgttccagtcgctgattggatttcaattaagcgttttgaatacgacgacaagaagaatgctaaacttaactatgaaaaggtagcagaaaaattgggccgcgacatgttcgttaagccatctaaccaaggctcatcagttggggttagtcacgtaactaatgctgacgaatatactgcagccttaaaagaagccttcaagtatgacgataaggtcttagttgaagaaactgttcctggcaccgaggttgaaacagctgtcttaggtaacgacaagccaattgtagcaggtgttggtcaaatcaccaatgcaaaaggttcattctacacttatgaaaataagtatgatgataattcaacttctaagttacaaatcccagcagatttaccacaagaaattatcgatactgttagagaaaatgcacgtaaagtttatgcagcaactgaatgtagcggcatggctagaattgactccatgctcaccccaggtggcaaggtagtcttgactgaagttaacgctttaccaggctttactaatatcagtatgtatcctaagttgtttgaagaagcaggtgttccttacagcgaattgattacacgcttaatcgaagcaggtatggaccgttttgatcataagaaaactttgcttcacaagcatgactaaacgccaaaaatatagaggtagatttcaatgacgactaacaagcatgattttgaagaattggctgcaccaaaagcagctgcacaagaattaggaattagtgttgccacgttaagaaagtattctttaatcgtggagaaggtgaccggcaagagcgactattttgctcggactaagcaaaaggctcgtctgtatcatcaaaaagatattgatgacttaaaggcttttcaccgtttatctaaaaatagtggcttaactttgcaagaagccgctcgtcaaatctatgctgttagtgaaaagaaacctgaacctgaaactaaagaaccagctcctaagcccgcttataacagtaccgatgtaatggatactgagcaggtggttaagttgcttaacactttgcaaaagacaatttctaatcaaaatgaggcaattaattctttgcagaagcaattgaatgtcattcaaaagcaaaatcaagatttaattgaagcacaaaagcaattagctgcgccacaagatgatttagataagtttgcggctttgccagatatttctggaattgtgagtgcggatgaacctaaaccgaagagtgaagaagaaaagcgcgctgaagttaaaaaagacatgaataagagtcaagaacaaatgcatgacgagattatgtctaaggcaaaggaaaatgccaagaagcgggctacttcaaatgttcaccgtacactagaagatatgcaattaacggaccaaaaggaacactggtggcaaaaaatctttaagttttaaacaaattgattaagaatcaagagctgacctaacaaaaggccagcttttgttttacagtaggcgtataacaattaataggaagtagaagtaatgaaatttaaatggaaaaagcgctatacgatagcagttatcgtggcaattgtgggagcattattgacggttttgtcctattttgccactgatatttaccacaaggacgacgttgccgtgattaccgatagcaagatcaaggatactttgattgaaaaaagtgaagatgtgtataaaaatgcggatgaaactcgccagcaaattttgcacttaaaagttttatcgggtaagcacaagggcgaaacttacacgactaaaaacgtgtattatccttcgcaattgacgacgcaaaagtatcgtgcaggtcagagaatttttgtcaatatcaagaagggtgatccagcgatcgttaatcctaagcgtgattgggtgttagttttggtagtgacaatcactttagcattgatggtggctgcagtagggaagcactcactctcgctggttgtgtcaatggtaatttcgtggctgatcttttatttgattatcatttgggatgtgcatttgaatggcgcccacattattttgctgtttggcttagctgatatcgtcttttcattctttagcttgctcattgtgcagggcttgaataaaaaaatgttggcgacttggttggcaacgctgctaggagtatttgtttcttttgccttgtgctacgtgatcatgaagttaacgggtgaatcggaaatgaaatatgagaccggtgactatgcaacgcaagatccacgaggcttgtttttagctcagactttgattggaattctaggtgcagtaatggatgaggcgaccgatattatttctagtttgtatgaattaattcaaactaaaaagaatattacgatgagacagttgattcatagtggtcgaacgatggggcaagaaattatgggaccgttgattaatgtcttggtcttaatttttattgccggtgcgctgccagaaactattttgtacttgcgtgataataatactttagcttcaacttttggctttactctgtcgctgggggcaacgcaaagtgtgatttcggcaatcggaattgttctgacggttatttttgcgacaggatgcagtttgttcttcttgaaaaaacgcgattggaagagtttgtttaaaaaagaaggtgagaataaatgagtacattatttgcattgattgttgtcttagcgattttaatgacaattgtcggtggtgaaactggaattcgtagtttttttagtgtgctaattaatacgattctattgatcttagtggcgatgctaatatcatggggaattaacattgcaattttgacgctgatttttattcctttaaagctagttacgattatctttttaggcactcatgactatacggtagcaaagaattcattttattcttccttcttagtgtgtttgattattagcctctttattttgggttgtcaatacctggctcaagctgcaggactaggaccagaggcaggagagttattggttggcttgtcgcagatgccgggcttgagttatccgatgattgccgtgacagtggcgattttctcaactttgggtgcaatcgccgaagccgcggtagcaatgagttcgggcttgctagaaatcaagaagcataaccctgctatcggtgaagaagagttgatggcttctggtacggctattggtaatgatgttttgggtacagcaatgaacacgattttatttgggatgttcggtagttttttgtcattattcttatggtatttccgcttgcattacacgattggtgaagttttaaatgaaaaactttttgtaaatgaagcgttaattatcatgtattctttgattggggttatattaacagtgccactatcatcatttatgctatcaagaggaatgagcaagaaaggaccaaaacatgagagtagaaaatctgacgctgactaactttaataatcgtgaatatcaagttcatacatatgtgctagagcctaatcctgaattggttgagcaaaagcgcccgctagctattgtagtaccaggtggcagctttaatcacttatcaaaaagagaaggtgaacccgtagccttagcatttaacaatcaaggcttcaacagtgtggtgatggaatataatttagtacaagatccaggtaaaatttaccctgatgcggggttagatgttctaagtactgtgaaatatttcagagaccacgctgatgagtatcaattggataaagataagattttaacagttggcttttctgctggtggtcatgtggtcagtgtagctaataacatggctttaaataaaaattatcagacaaagtatgattttgataagactgatgttttacctaataagacaatcttaggctatccgctgattgatattaaaaagattggttttccgattccagaagatcaaaaagcaaaaatgcctgtagaggaagatattttggatagtgcattaggtgttacacgtgaaacgcccgatacatttattttccaggcatgggatgatccggtggttttgatcgaaaattcgattgaatatattggtgctttgaataagaataaggtttcagcagaagctcatttgtttaaccacggttaccacggcttttcattggctcgtcacaatgtggaaactaagggtcaagattggcaggataatccgcacgcggcgcactggtttaacttggcaatggaatggctaaagagtgagtggggcgaatgatgtgaagcataaaaaatcttctaaccctaatgacaatatctatcacactatcgtcaagaatagaaaaattgaccgaatgattatgccttttgaagcggtgtactgcgtgtggctaatcattacgctggttcttaactttaagctatttgcatactcgattgacgcacaattcgtgctaatttctctatttttcattagcggatgggtttcgtcattagttaagaatcattgcatgaagaaaagtagaaaataagataagtaaaaagagttctcgcacgagaactcttttttattagaatcatttactttttatctctaaagaaaataacttccttagcagccacaaatgggccagatgacttataaacctttaatctaatagccttggtatcgacatttcttaagccaacaaccttattcttgctatcagacttccaagtcaagtgatcgccgtatggcttaaagttaacgccatcgcttgaaagctcgacactaacttcaacaggatcgccttggtgatcaatctttctaggtacccagaccattcgactcaagtgttccaaatgattaaaggcgaagtttaattcaagtggcttgtcttcgctgaccccatcaatggtttcccattcacttgctaacttcaaatcagtcaagtaatcaattggatgatccttaggactagctagactgctcgtgacatgaatgtcattaattgcgtagttcattggatcgggcttggtaattgcgccaaacggatctgaccattctgaaaccttattaccagctacataacgcaagcgtagggtgtagcgggtatttggcactagttcatggaaagtgaacgaattgccatcaatgccgtcgtgcaagatgccgttaacttcaatttgaacttgatcggttaattgcggccagactaccgtcaacgaatgagagctgatcttgtctggatctaccattggttgttttggtgagcgtaatagtgaatccgtaatggcgtgaaccaaagtttcattgccatatctgaagtttctaattgtaatttcaatcttagaatcggtaatgtcgcgtttagccagcttaatttgtaaagcagtttgtttcttttcttggtattgatcaaactcaggcatccagctgtaatttgtgttaaagaagaagccttccttagcatgggcaaatgtatcaacggtaccgtactcctgcattgggatttccttgtcgttgattttaacagtcaaaccatcaggataaccgtcacacatgatgttcaagttggtggtgttttccgtttggaaagtattgaaatcgccttgagttgggtcgatggtgatcgtcaatttgcttgcttctaaatcactcgtgatttgtgtagctacatggtttcttgaatagtcgttatagccgttatcatcgtaagtaaccattttactcttgccttgagggtagaggacataattgcgttcgccgaggtcaaaaatagcgccgcctcgtacaaatactggtaaatgccaggatgggtaagactgcttattataaacgcgtccgcccaagtactttttgccatcaaataagtcaacccacattgttctgtggttaggcaagtaaaggttgtcttttcttgaattgccattaccatcttcgcgaccgttaacaattggcgaaatcaacaagttaggccctaacataaattcatggcctacctgtggggtgtagttgacttgttcatgtggaaattccaagaacaatggccgcaagattggctcaccgacttgagcgcggtagattagggtatataagtaagtctgcaattgctcacgtagttttaaataggctcgattaatttgcgtcatcttactattgtaagcaaatggggtcttactaaatttaccttgatcgtctaagttgaacaggattggggtaaatgccttccattcaaaatcacgaatggcaatttgagcattaccaccgccagcggtaccgtcaacggcgctgccaactaaaggctgaccagaaaggctagctcccaaaaagccagctacttgcgttggaatgttttcccagttgccgccaatgtcaccaaaggctagcattgttctattttgactaccagcaataccagtattagagaaaatcaacggccgcttacgcttcaaattgttgcgtaaaattagcgcatcatttttcaatacttttggatcggttgtgtccgtttgaataaaggtggtatcaggtgaagccttcggtgtgttgttttgactccaaagaccagcgctaacgtcatgtatagcggcgtattcactgaagctagccatggcttcttcgttgatttcttgcacatcatagttaggcacgatccaacttaatttaaaatgctgcttctggtagcgatcaaccattgcccgtgctgagaattgatattcttcttcgccgttcaaggaacctttgccactagcatcttctggcttgttagttctggtgtaataattaccgtcttcaaacatgacagcattacgttccttagcttcaccaggttgccataaggtagttaaaaagttgccaacatgacctaatcctagtgcatatttaggtggcatcagcggcttacccgttaacatgtaatactttgccaaaatatttttgggtgaattacctaatagataaaaggtatcaaacatgttggtgtcgtgcttcaagatagtggcatccggattgcttttaccaaagtcataattgccagcactctcagtattgcgcaattcaccaaagccggagttagcccagaagaatggcactcgggtcaaaacgccgcctttaccggtaatcttgtcgcgcttgattgaaatgatttcacctttatgactgaagtagccgttctgcatcccgccaccaaagtaaaattcattcttgtgttgcttcaaaatttcggtagtttgatcattgcctaattcaagtggactcagctgaaccaaacgattgcggtgcagcatctcgtcaaagatgctcattacggctggcttttgttggaaaataagttgataattgccagacttaatgattaaggaatcgctggttgccttaggctgtgatttttcaaaatagtcattgttgaattgagacaggtcaacaaaagatgagtgattctcgtcaaacttcttagctggatcgagaaaatatctgaagatcccgtcagctaaaatataaagacgagcaatatcgccggtggagtagtgaagttcataataatgatcacgtttgttggcaccgataagttggcctagttgatgtctttctatttggttttgtgtcatatttattcttcctatttaaacttgctaccttatattataactaaaaatcaaaaaacttcttaagcaattgtactaaaactggtatttaccaattttgttagatataattaaattaacaattacgatttagacatataaagaaagaagatatttatgacttattacattcatgcagataaatttttcttagaaaacagaacagaaaacggcggctatcttgaagttcaagataatggcaagtttggctttttctatccagaaagcaaaaagccaaaaggtaagattgtcgattatgctggcaaatgggttgcaccaggattagttgacacccacattcacggctcattgcgagaagatgtaatgaagagtgactgggaaggcatcaataagatctctaagggcttgcttagtgcgggggttacttcatggatgccaacaacgatcactgccgcaagcgataccttaactagaatctgtaagatgtttgcggaccatcaaggacaagaagaaggggcaaagattcaagggattcactttgaaggaccattcttcacggaagaacatgctggagctgaaaatcctaagtacatgatggatcccgatattaatgaatttaacaagtggctggacgcttctaacgggatgctgaagaagatttcaatggctcctgaaagaaaaggttccaaagaatttattcgtgaagccgttagggaaggcatagtagttgttttgggccactcaagcgctagttttgaagaagcagtcgcaagcgttgaagcaggtgcaaccatgtttactcatacctttaacgggatgcctgatccaagccaccacacgccatcaatttctaatgcggcaatggcacttaataatgtgaccgatgaattaatctgtgatggccaccatgtgcaaccatgtatggctaagactttgattaatgccgttggtccagaacacattgccttgatcactgattgtatggaagctggcatgatgccagatggcgactacatgttgggtgaattgccagtctatgtaaaagatggcatggctcgtcttaaggacggcgacaatttggctggatctatcttgcaattgaagcaagcagttaagaatgtagttgactggaacatcgttactccagaaaaggcagtgatgatggccagctatgttcctgctaagagtgctcatatcttggacaattgcggtacaatcgcaccggataaggatgccgacttcttgattttgaacccagatttaaccttgagtgagacttacctaaatggtgaattacgttataaggcttaatttgttagtctagttttaaatagtcctcattagattgagggctattttttgaccctaaattttggcaaatagtatacaattaataatagtaaagtaggtattatacatacgaggaggaatttactgtgccagatggaatcagtcaattactagtactttttatgtaataactttcaattaattgaataatttgtactcttattgattaaagaaaagtatcacatatgtttcatgaatctcgtctagccaagtaggtgagattttttattatgtttctatgtaatcgctttcaatttagaaagaaatatgctatattatgagtgtaaagaaattaagaaataaaaaatatttaaataagtttaggtaaaaggagacaggtgagttccgatgggcacttgagagtagaaagtcagatattatagaaaggtttgtgataccaatgggcatcgtaaattgaaaacaaaatgtagttcaataatcatcaagtgatattaatgtacataagaggccgtgaaattattagtaggcatagaataataactatttgatgaatcacttggattaggattaagaaagactttcatacatgataaatattaataagaaatgacctttcgctggaatgaagtatgcgaagggtcatttaattttggcttgaaaacgtttggtatttagcattattgttatttgttaaatataatatgaagtacatgtactaggccgatagagaggaaagttatgacaacagactcaattaattttaaaatcgatgcagaaagtaaaaaggtgatgattaaagaattagcaattattaatggcttaattcctgatgatgataatacagtagataatctaaatgattattttaaaaacttaggaatttaatggtttattggtcttttatctgatgtagtaaatcatgatttagtaagtcgtaatttagtaaaatataatttagaagatggtgatcttatgtttattggacgaaagaaagaacttactaaattagagcaatttaattagcgtggctaaaagatattactacttgttttcaaagtcaggctttacggattcatgtacggaactggcagaacaagtggggtgcaagttgattagttttgatgaaatgtaatatcatttttcctattatttttatctgttgtgatcggagtaagtactggtgtttaaaaaaggcgataatgtggtgttaattctaaagcctaatggcaatcttgaaatgaaaaaagaaaaaactaatttttgggacgaagtatcaaaaatgtctgctaaagaaaaaagattgcagattgaagatttgggatatgatccattagaacaaagatcaaaaggtagagaaagaattgaggattaaaagttagaaaaggttcttggaatcttttttgatgaatttaggtaatctgaaaaaagaaacggcaccgctagataattagcgatgtcgttttagttatgcttagctatattagtatgtctgcttaatttatttaataaactgcgccgtcgtagaagttgtaacgagggcggttgaagtcgaagtcttttaattcactgatcttaattgcgttatcgcaaacaccccagctcattaagttgattggcttaccgtaatcttcatcaggaattaccaacaagatgtacttgccttttgaaagggcatagccaagttccattcccagaccaacatcttcttcttcaggcaagtaaacgccaagcatgatgtcgctggacttaatccctactaagtcgttatggtaggtagctgatgcccattcaatgtcgtgcaagtattcagggtgttcatcaacgcggatacccttatattgattatcaagaggtacgtagctgttttctaagtcaacggtaggattttgctttagagcttccattgcttctttgtaagccttattttgcttttcgttgaaccaaccggcaccaaagtataaagtttttgtctttgccatatttttctccctttaaaaatgatttaccttaactttaccatcttttgggttgaaaaaaacgtcttgttaacttatggtgaaaatgttaattccacattaggaaggaaaaatccaatgactaatcaaaatctttttgcacctgatgcagtatttatttctaatcaaactaagcaagatttggtttttaaagaagtttacgagcatttacgcgaaagtggctatgttaagggaaactttttaaaccatattgtcgaaagagagcataattttccaacgggattggatactgcaacactaggtaaaaatattcctaatattgcgattccgcacaccgagggcgagtttgttaacacgagactgattgttccggttgcgctgaaaacgccagtcacttttcataatatgattaatcctagccaagcaattgaagttaaatttttattcatgcttttagataatgacccagatgggcaagctgcattattagctcaagtaatggattttttggctaatacgccagccaacgaattgcgcgaagtttttaattttactgatcctagcgcgatttatgcctttttagagcaaaaatttggtaagaaaaaagaagactagtttttagccttttttttctaatcttcaagataaatattacgcaacttcatgatgtctgcacttgagagcttcattacatcgcgtaggtagttattaataccgccatattcatcgtttagtactttaacagcatggtcaaggtattcactgcggacactctgaatgtcacgaatcgattgcagcacattttcatttttaccattttgacgggcatgttcaaccatactgtcgacgaaatccttggtagtgatgttggttaaaagatagtctttcttaatcgtatttagtggtacgccaagagcagataatgcaagtaatgcaccgaagccggttctatccttgcctgcagtacagtggaaaataacactttcgccatccaccgtattttcaagcaagacatcgaagaacttgcgatatgccttttgtgcaggttcactttcgatcatgtcttcgtaagcataatgcatgtgattgaagccaaaatcagcgtcgtcgtgtgcttgtgtatctaagtcagtgatactcttggatgaattggttaagtcctcactgaagacgggatcatagatatattcaacaccatctggcacgcgatcgggttgattatcaacttcttctttacttctgaagtccacgtcatatttaacgccgtaatcagttaaaaactgcttatcaaatggtgaaagatcagctaagttaccggttctgagcaacttgtgcatcttgatttttttaccgaataaagtttcataacctccaagttcacggaagttgcgtccactagttactccgattaattgattagttaattttttagtcaaaaaaattctcccctttctgttaatgaatgtcatgaatattattttagcaacaaatcttcaagcaaacaatcaattaaaaagtaacggctttcaaaattatgctaaaataaagggtaagtactagtgcaatttataggagatgaattaacgtgacagataaaacaaaagaaagcattttagttccagttgatggctcagaatcagctgaaagagcctttgacaaggctgtaaaagttggtttgcgtgatggtgctcatgttgatgtattgaacgtaatcgatacgcgtcaatttatgggtgaaatgcaagacactttgatttcaggagataccatttaccaaatgactcaagattctgaagaatacttgaagagtttgaagaaatgggctcacgataacttcggttttgacgatgttgattatcacattcgttatggcagtcctaagcgcattatttcttacgacttcattaaggaccaccacaatactttaattgtgatgggtgctactggtttgaatgcagttgaaagaatgttgatgggttcagttactgaatacgtaaaccaacatgctttagctgatgttttgattgttaaaaccgatatgggaaacaatcctcttaagccaactatgaaaaagaactaatataagaataatcgccaaatgattctaaattcattggcgattatttttttgaaaaaagttgcaaaataccttgatagaacacgaatgtttctggtattattttatcaaatgaacgtgggaacgaaaaaggggagtgaaagataatgtttatgcaatcagaacaatttattgcaaaggatgtgtctttcgctcgtaaagacgttttttctgttcgtttagttattagaaacgtcattaattaggcttaattattgatcgcctttggcgacccgtaattaagtctttttttgtgatgtagagtagtttgttttatcactgtgtatttatgtttatggaggacataatgaaaagatttagaagaatcttggtagcagtagttgcacttcttgtagcagtagttgcaactgcgtgttcaaacaagagtaatagttctaagggtggttataccccaaagtcattaactattcaatttgtaccaagtcaagctgcaactaagttgcaagctcgtgcaaagcctcttgaaaagatgctttcaaagagattgggtatcccagttcacgtttctatgtcaactgactacaacaccgttgtggaagctatgaaatcaaagaaagttgatgtaggttttcttccaccagatggttatgttttagctcacaagcaaggcgcagccgatttgcttttgcaagctgaacgttacggtgttaagcaaccaggtggtaaagcaactaaccaattagtaaagagctatcgtgcagaaatccttgttaagaagggttcaaagatcaagaactggaaagacttaaagggtaagtcaatttcagtacaaaacccaacttcatctgctggatacgtattcccagttgctgaacttaagcaaaagggtttggacgtaactaagagttgtaagttagttactgttactggtcacgaccaagctgttttgaacgtattaaacggcgatactgatgcagccttcgtctttgaagatgcacgtaacatcgttaagaaggacaacccaaagatcatgagtcaagttgttccaatttactttactaagccaattcctaacgacactatctcagtaattccaagtatgtctaagtcattccgtaagaagcttgctaaggcattcatctctgtagctaagtcaaaggaaggtaagaaagttatcgaaagcgtatatagccacgaaggttacgcatacgcaaaagatagtgacttcaacgttatccgtaaatacgacaagatcgttgaatcaactaagaaataataaatttaattaagggagtttgacgattaaatggcagataagccaatgattcaattaaaagatgtttccaagatctacgacaatggtactgtaggtttaaagggcatcaacttaactattaataaaggtgaattcgtagtagttgttggtttgtctggtgctggtaagtcaactttgctacgttcaatcaatcatttgcatgatattacttcaggcgatattttgattgacggcaaatcaattacaagtgctaaaggcaagaatttgcgtaaattacgtcgcgatatcggaatgattttccagaactttaacttggttaagcgttctagtgttttgcgcaatgttttggtaggccgcgtagcttactacccaacttggaagactacttttaacttattcagtaaagaagataaacaaaaggcttatgaagctttacaacaagttgatttggccgataaagtttatgcacgtgctgacgagttatcaggtggtcaacaacaacgtgtagctattgcacgtgtgcttatgcaaaatccaaagatcatcttggctgatgaaccaactgcatcacttgatccacagacttcagtgagagtcatgaatgacttgaagatgcttaatgaaaaatacggcatgaccgtagttgctaacttgcacagtatcgaacttgcacaacaatttggtgaaagagtaatcggtatccgtgctggtcaagtagtttacgatggcaagatgaaagatactcctaagtctgtcttcactaatatttacaatggtggtaacggcagcgaggaggatgaataatgcctgaacaagtaaatcaattgcctaagcgtaagttcaaagtaatgaacttggtttggacaatcatcatgattgcaggactatttatttcaatcaatgttactaacacgcacattagtgtcttgtttgaaaactggaaccaatttgctgacatctttattcaaatgtctcatccagattggagctacttgaacgttgtttggcctaagttgattgaaaccatcaagatggctgtcttgggtacggtaattggatctgttgtcgcatttatctactcattattgattgcccgtaacatcgttaagaacaaggctgtgactggcattcttcgtgtgatcatgaacattgtcagaaccattcctgacttgcttcttggtgcgatcttcgtagctatcgtaggtatcggtccagttgctggtatcttggctttagcagtcttcacctttggtgtggttgttaagttgttctacgaagcaatcgaaacaattgatccaggtccaattgaagctttgactgccgtaggtgcaaacaaattgcaaattatccattacgcagttatgccacaaattatcacttacttcatttcatatgttctatatgcatttgaaatcaacgtcagagcatcaacagtccttggttatatcggtgccggtggtattggtttgaacttgcaacaaactttgcaggtcttcaattacgctcaaactggtacgatcatcatcgttattatcgtagttgttgtcttgatcgactacgtttcatctaagtcacgggaggcgttaatgaaataatggatactacaatgaaaaaattacccgctaaacccgttgaccgtaagaaacaagttgcacattggctaattgcaattgccactatcgtaattattgtttggtcatgtactggtattaacttcggtggtattaaagccactgctggtcaaattgccggtgcaatcttctcaggtattttccatcctgactggagctatgtttacaatggctcaggtgaagacttggtctcacaattgtggcaaaccatttgtatcgctttcttaggtacattcatttccgcaattatttcattgccatttgccttctgggcagctcacaccaagcacaagcattggtacacttcaagaatcggtaaaattgttttggcaattatccgttcattccctgaaattgttcttgctttgatgttcatcaaggccgtgggtcctggttctgcagccggtgttttggcattaggtttccactcagttggtatgcttgccaagttgttctcggaagctattgaaaacttggaagaagggccaaacgaagctgttattgcagccggtggttctaagttccacgtaatcatgttttcaactatgcctaacttgatgccagctttgatttctaacaccttgtatcgttttgatgtttccattcgttccgcatctatccttggtttggtaggtgccggtggtatcggttatccattgattattgctttgcaatatcgtcaatgggaccgtgttggtatcattttgctagggatcatcattatggtggtgatcatcgactggatttctggttggatcagaaagaagttagtctaattcccaaaatttgaatattaaagaaagcgaagacgaaaagtcaatgtcattaagttaagacattgacattatatcgacagcttttaaagatcgaatcattttgattcggtcttttttctttttaaaataaaaagtgagcagagtttatttgcctttctgctcactttcgtcatattatctggtctttcatagaaagctgtgcctcttatgaaatcccttcactcaaatattttaaagctgatggatagtattatcaataaaatcgctgacaacattcacgatttctctgtatctgatcaagcttttactcgctgtcgtaagctcaattccactgatttgattaagttaattcttaacatgggagctggcagcctgaattcggaaatttttcatgcttttcctgacataaattctagaatgactgcttcggcttttgaacaacaaaaggctaaattaaagcctgaatgctttaaagaaattatgttagaacttagccgggcaaataatgtactgcaattattagataatcaatacttagttgttgcgattgatggctctgattttgatcaaccttttaatcccgaatcagaaaatatttttcgaggtaaagatggtcgaatatactgtcaacttcatgtaaatgctctttatgatgtcttgaataaattatatttagacatggttatccaacccagacaaaaaatggatgaacgtgaggcagccttaactatgttaaagaaattagcccaacaagaaaaagatttcttagtcctgatggatcgtggctatattagctttaatttaattgaaaattgcaatcgattaaaacattgccactatgttatgcgatcaaaatccggagatggtgcttttaaagaaattgtagctatgtcgaatcatgaatacgatattgacttatcatgcagagtaacttcgtcacattattattatgtcacccataaagatacagaaaagtttcttcacctgattcttcacaaaaagcatcactataaagctgttcgttcaaaaaataccagagatcaacgctgggattttgaggatatgtgtgatgttagatttagagtttgtaagtttagaatcaatccaccaggttcagacgatgagtgggaagtcctcatcaccaatttagatcgaaatgaatatcctctagctagaatgaaagagatctatcatcttcgctggggaatagaaacttcttttagggagcttaaatatgacttaagcggcatacagtttcattctaaaaaagatcaatttgtttatatggaaatatacgcccattttgcaatgtataatgccgtgagtttatcaataattgcgagctcaaaaccgtatactcagggaaaatatcaatatcaaatagattttaaaatggcctgttgtatctggcgacgatattttagtataagtgataattcagataaaaacttcacacaattactgctggatgtggcattttatttaacgcctattcgaccaggaagaaaagataaacgaaatctaaaagttaaattagtagttggctttccttatcgtctagcagcttgaactaatttaaacgactatcttaagatggcttatttgtgctatcaaaaaagacatttatcgaataaaataattcgataaatgtctcaaaaagtgtcatcagattagtcaatgtcttaacttaatgacattggacgaaaagtccccgcttttttgttagccgtgaaatttaaattggcattgattaagatgatcattaattaatccgattccctgcaagtaggaataaatgactacaggtcccacaaaggaaaaaccatcttttttcatttgtttggatatcttctgcgataggtcattagaagcgggaacgtcatcaaagctggcaatatcatgcacaattggagtaggtacaaaattttgtaaatatttggcgactgaacaatatttttgttcaattgccaaaaatgcccgagcatttttaacagcagcattaattttcattcgattacggataatgcccttgttttgcattaatgactcgatatctttatcggtcatctttgcgacttcagagatctgccaatttttgaatgcagctttaaaattgttgcgtttatgcaaaactgtggaccagcttaaacctgattggaaaagttcgagcacaagcatttcatacaaatgtgactcatctagattaagtttgcaccattcatgatcgtgatactcctgtactgcttcgtcttttgtatcgccccatggacagcgaataatttcttgattcatatttttctctctttctatgtaagtaatgttttacccctctattatttattacgcaaaaaaatgcgattattttttgagaaattatatttttatgtgcgaaataagggttttaacagctttttttgctataattaggtgtgaatttcgaggaggatcctatggaaaaattagataccatgatgttggctgatgatttagccttatcacaagataaaattttaaatggcgaacaagactttggcgctgaagctgtttacaaagtaatcgataacttgggcgttttaaataacccaatcaaggattacttcgacatgactgaagaacaatattatgaagctgaaagcgatcacaaactaactttgatcaagatggacagtaagttgactgatttgcatgatcgcattttaactaaccatgttgatggttttgttgataaggacgagatcaacttaacctacaatcatgagaatctatatgaagatgatttatacgatccaactactgattatcgtgaaattgtttacagcttgaaagttattggtgcggttcaagcaattgcagctaaggacttgcaagaagtattgtctaaagatgctgtattatcaattggacttgccgcatatgctttagcacacaacgcataaattatttgagtcggctggtaagcggccggctttttttgcttttttgaggcgaaaagatgaatttgtttaaacacacaaagggaatagttgatcgaatcgttggcgccaaaaaacgctctgcaatggataaggatagtgaattgcttgatccgatgcaaaaatatactactgttggagaatatcatgttggtgccgttgatggtactccacatggtaaggactatgttttaaccgtttatcaagacgaagacggcgtgttgcgacaagcacttagtccagagactacaacgaaattagcaccggaatatttacgcaagtataatgcgaaactaggtcattttcgtgcctttcataataagaagacagggcgccgttattgggtggaaaattacttggataatttcactacggaagtgaaaaagcatattcgcccaggcactaattcggtcaatatcggtgtaattacagatactcactttaaagataaagatagcagcgatttttatggctttaatgggctgcaacatgtgcaagaattttcttatttagatcaatctggcttgctagatttaaaagtccacttaggtgactggatcgatggctccgatgctggcctggtcagtgaaagtgaattggtcaagctgaacaagtcttttaagtcggatcaggtgccatatttgagtatcaagggtaatcatgatgaaaatgataagtttgatgaacatcatgatttaaaagcctcatttccagaaaatgaattcgaaaatattatgtggcccgatatgtaccgacaacgaggaattcattatgtttcgcgccagcacggggtggcatactttgatttagatgacgtgcgggtgatttcagttaatacgtcagatgttccatatgaattaaataaccgcgggcaaaagcgctatgacaataagattgtattggctgtgcgtgaagatcaaattgaggaaattatcgaaattttggctaattcttccaacaaaaagatcatcttcatgtcccatgccaacccgattaatcgaaaggggtctaatgcacttaagtataatggccgctctttgcacgaactgctagttgcttttaatcaacgtgaaaaaggtcgaatgcacgctagcaatggtgttccagcagaatttcgtttatcaaatagttttgattttaccaatatcaagaatgcgagaattattgcctacttctgtggacatcggcatcgtgaagaccagtatcggatcaacgggattcaatatattttgtttaactgttctgccttgatggggccaaatcattccctaacaactaaatacaacaaaaacttagaccgaagaattgatcaaaataatgaatttgcgggttatattgtgaacgtcgatttaaaacgacaccgcattcaatcctttggctatggtgcagcttctagacgccgggtgtatttcatttagttaaggaatagtaaaggtatttggctattacaagtgtttagcttataataaaaaggttaaagtaaaaaatagtgaatattatagcaaatattaagatttagagaattgacttaggggaatttaaattatgtgcggaattgtcgcgttttatgatccaaagataaatgaaaagcaggctgtcattggcaaaatgatggccacgattaaacaccgcggacctagttccgacgggtattatactaatgacgaggttgcccttggttttagaagattatcaattattgatcttcgtgggggtagccaacctatttataatgaagataaaactagagcaattatttttaatggtgaaatttataactttaagccattaagagaagaattaattaaagcaggccatgattttactactaaggctgatacagaagtcttacttcatggttatgaagaatggggcatggatggcttgcttaagcgtgtacgtgggatgttcgccttcttaatttgggatgacaacaacaagaccctttatggtgcacgtgacttctttggcattaagccaatgtactacagtaatcaaaatggccatttgttggttggttcagaattaaagagctttttggaatttccaaagttcaagcgggaattaaatgttgaagcagttaagccatacttgatgaatcaatacaatgacctagaagaaaccttctttaagggcatttaccgcttcccagcgggccattggtttgaatacaaagatggtgaaatgaagacccatcaatattgggatgctgaatataaagaaaatagcctttcctttgaagaaactttgcaaaagatcaacgaagatttgaaagaaacggttgatttgtatagaaacgctgatgttaaggttggtgctttcttatcagaaggaatcgactcttcatacttgactagtttgcttaacccagatgacgttttctcagtaagttttgatgattcaacttatgatgaagcttctaaggctaaggcattagcagatattaatcactggaagttcttcagcgataaggttgatgctgatgaagcaatgcgtgacttcccagaaatgcaataccacatggatgaaccagatgctaatccgtcaatcattccactctggtacttgtgtaaactagctcgtaagcatgttactgttgctctttcaggtgaaggcgctgatgaattgtttgctggttatgtgaactacgggatgcatacgcataacgacattattaaggtctttacttcagaattgaaaaagttgcctgagaagaagcgggttaaattggcacacaagattaagagaatgcctaatttcccaggtaaagttcacatgtacaccaatttagctgaaccgagtgaattttatgtcggtcaatcggttatctatgacatggattacccaactatctttacttctaaagatgctaatagcattttacagccaacgtatcgcaataaattgactgttaacggcatttaccaaaaagactttaagaaagtaaagggagtcgataatgttaagcagatgcaatacattgacttgcaccactttatgcttaacgatattgaacaaaaagctgataagatttcgatggcccattcacttgaagttcgtgttccttacctcgacaagaagattgcggaattggctaactctatcccaaccaagtacttggttaaccgtcatgataccaagtatgctttgcgtaaggcttcagaaaaagttttaccagatgagtgggctaagagacctaagcttggcttcccaactccaattaagcaatggttgaaggaaccacgtttttacaaacaagttcatgctctttttgaagaagaatttgtcaacgatatttttgaccaaaagaagattatcaagttacttgacgacaactatgaaggtgatggctcacatagacgtcaaatctgggctatctataccttccttgtttggtacaagttgttctttgttgattacgaaaacacagttaagaaatatcaacacgtgcaacctgaagttgctaagctaatttcacagggtaaattactataattctagggagattttttgaggatgagtaaaaaatttacgccgatcttactcggtagtgatatcaacgtgtatggtatggcacgttcatttaatgaagcatatggcattaaagtgaaggccttagctgacgttcaacttgctgctactcgttattcaagcattgtggacgttgaattgcatcatggctttagtagcgatcctacttttatggacgtgatgcacaaaaagatggaagaatacaagaatcacgaggagccagttatcttgattgcttgtggtgatggctatgctgagttgctttctaagcaccaagatgaattgaaaaaggtctttatcgttccttacataaaatatgacttacttgaaaaattaatctctaaggaaggcttttatgaaattgcggaagaatatggcttgccttatcctaagactaagatcattacgatggatgactacaagtcaggtaagtacgaggatgtcccatttgatttcccagtggaattaaagccggaagatccagtttcatggttgaagtgtcaatttgaaggtcggaagaagacttttgccattcaagataaggctgaatttaaggatatcgtaactaagatttatactcatggctacaacgctgaccttattttgcaagactttattcctggtgatgattctaacatgcggaccttgaatgcttatgttgataagaaccaccaagtaaaaatgatgtgtttagggcacccattattggaagacccaaccccacaatcaattggtaattacatggcgattttgcctgagtacaatgaaaaattgtacgaagaagtacaacaattccttgaaaagttgaactacactggtatggccaactttgatatcaaatatgatccacgtgatggtgaattcaagttcttcgaaatcaacttacgtcagggacgttctagcttctacgtaactttgaacggttacaacttggctaaatggtacattgatgactatgttgaagatgccttgaaagataaggaaacagtttatggtaataagcttgaatctaaatacaagctttggttaggcgtgcctaagaagatattcaataattatgcttatgacaacgactataagacgactgctgacgaacttattcgtgagggccgctatggtactactgtcttttatgacaaggatagaaacttcaagcgctggttattgatgaagtacatgttccataactacttcaaacgttacaagacttactatgaagttaataagggtaagatctttgacgaagaaaataaaaaattaaacaaatagtttaaattgagaggtaaaaaatgcctctctttttttctaaaaaattttagctgaatcatttcccaatttaatggtcttttggttaatacaagatatattcatctatatttgaacacaatacaagatgttgtgttttatgctatgataaagacacgagatttggagtgattgaaatgctaaaagaagaatttaaccaacaaaatgtaacaaaatttaatacgcctaaaacttttgttaaacgtgatgggtcaaagtatccgttcgcaatttttaaactcaacatggttttgcataacctagatttagataatgtagcacctgctgtaattgaaaaaattgtggctaaactagatgctgctgatgaagtaaatgcacaagatgtagcagttgcttttagagatagcctaaatgagttgggttatttggatgaagctaaagcttatgtgcaataccgcaagcacgatgaagaggaatggattaaacaaaccgatactcgtgcacggttaaagcgaatggttaatggtgacccaacgattgttaacgagaatgccaacaaagatagtgaggtcttcagtactcaacgtgatttaactgccgggaccgttggtaaaacagttggtttgaccatgatgcctgagcacattgctaaagcccacttgcgcggtgatattcactggcatgacttggattacacaccactttcaccaatgactaactgctgtttgattgactttaaggatatgctaactaatggcttcaagattggaaatgcctatatgactagtcctaactcaatcaatgtggctacacatcaagttacgcaaattattactaatgtagcttctagtcaatatggtggctgttcttttgatcgagctgatgaagtgttagctccttttgcagagaaaaactaccaaaagcatttaaaggatgctggcaagttcattgatgatcctgaaaagctggaagaatatgctaagagtcaaactaagaaggacatttacgatgccatgcaaggcttggaatatgagattaataccatgttctctagccaagggcaaacgccatttactactttaggttttggtttaggtacttcttggattgaaaaagaaattcaaaaagatatcttgcgtatcagaattaaaggattgggtagagaacgcagaaccgcaattttccctaaattagttttcaccattaagaagggcttgaacttacatccaggggaccctaactacgatgttaaacaactggctattcaatgttcaactaagcggatgtatccagacgttttaatgtatgatacgatcaagaaaattacaggttctttcaaggttccaatgggctgtcgttcattcttacaaggctggaaggatgaaaatggtaaggaagttaactcgggcagaatgaacttgggtgttgtaactgttaacttgccaagaattgccatggagagtcatggcgataagaagttattctgggaaatcttcaatactagaatgcggacttgccaccaagctttagcctttaagggtagacgtgcaattcaagctaagcccgaaaatgcgccaattatgtatcaatatggcgtctttggtaaacgacttaagccaggtgatgatgttaacgagcttttcaaaaatggtcgagctacgatttcgttaggctacatcggtttgtacgaagtagggacagtcttttatggccctgattgggaacacaatgaagaagcacatgattttacaattgagatcgtgaagaaaatgcatgacttgtgtgctaagtgggaaaaagaggacccatatcattggcattacagtttgtactcaactcctagtgaaagtctaactgatcgcttctgccggctcgatacggcaaagtttggcaaggtgaaggacatcactgataaggaatactacactaattcgttccactatgatgttcgtaagcacccaaccccatttgaaaagttgacttttgaagcaccatatccatattatgctgcaggtggttttatccattattgtgagtaccctaacttgaagcaaaatccagcagcccttgaggcagtttgggattgggcttatgacaaggtaggctatctaggaactaatacgccaattgataaatgttataagtgcggttttgctggtgaattcaagtctactgccaagggttttgaatgtcctaagtgtggtaatcatgatcctgctacttgtgattgtgtcaagcgaacttgtggctacttgggcaacccattgaagcggccaatggttcacggtcgtcatgaagaaatcgtgcaccgggttaagcatatggactttggcatggaagatagtttagctaccgaagaagaagtaaaaaacggtgagtactaatgcctgaaaaagataaaaacactcaagaaggaccagatatccggagtaatttgatcaaggttaatatgggtggggataccatgtttgtggatcctgaccaatataagccacagttagatcaccaacgtgagttaaaaagaatgcaccgcaagccgaaaaatccaaaaccacaagagtggaagactgaggattattctaaacataaaattgcggattataagccatttaactttgttgatggtgaaggcgttagatgtagtctttatgtttcaggctgtttgttcgattgccctggttgctataatttagcagcccaaaactttaattatggttttccatatacgcaagaattggaagaccgcattattaaagacttgggccagccatacgtgcagggattaaccttactaggtggagagccattcttgaatacttgggtttgtttaagaattattaaccgaattcgaaaagaatttggccacagtaaggacatctggtcctggtctggatatacttgggatgaattgcaaaaagaaacacctgataaaaaggaaatgttgtctaagatagatattctagttgatggccgctttatgaatgatttaaaggatttaaccctgcaattcagaggttctagtaaccaacgaattattgatgtgccaaagtcgatgaaggcaggcaaggttgtcatctgggataaattgcaaaaataagataaactaaagtccggaatgattttctggacttttttgctaggtgaaaaaatggaagaaaaaaatattaaacaagttgatcaaatcatgacggccttgacccaagtgattgatccagaattacaagttgatgtagtaaatcttggtctgatttatggcatcgatatcgaaggagataaggcaaccattaagatgactttgacaattatgggttgccctttatctgattatttggaacgacatattcaaaaagctgttctttcagttgctggaattaagtcttgtgacattaagttggtctggtatcccgtctggacgacagagcgtctttctagtgcagctaaaaagcaattaggtgtaactaaccatgatgatcaaattaagcaggagaaagccaccaaagagaagattatcgacttttcagtaccgatcaagaaaatggcagatgaataccctgactttgttcaaattatgtacgattgtggttttactagaattaaaattcctggattgcttaaaacggtggggcgtgtgatgaccattccattgggagcccaggcaatgaaacttgatttggctaaagtgaaaaaagcatttgaagataaaggatacaaggtaatcaatgactgataaaaaaagacaggatgcaatcctgaaaattttgcattatattcaaaacggcggcgattttgcgaccgcgaagaagatgtttcaagaagaattcgatcaggttgatgtggccgaaatcacagcggcagagcgcgaattaatcaagcaggggttaaacccagcagagattcaatacctgtgtaatgtgcatgccgatgtctttaagggtaatatcaaggagaatgcggtaaatcctgattttgctactccggggcacccggtgcatacgattaagctggaaaatatggtactgaaatcattggttaatgacgcactcttgccagatttgaaaaagtatcaagcaggtcaagatacactggataaaatcagaaaagaattgagtgatttggcaacaatcgataagcattaccgacgtaaggagacctcgctttttccattaatgaataaatatggcattacagctccgcccgaagtgatgtggggcgttgatgatgatattcgcgatttaattggggatgcaagcaagattgctggtgaggagcatccagataaagatcagttggctgaggcaattaaaaaggcgagtcatgaagtgcttgagatgatctttaaagaggagagcattatgattccgatgattgacgaggtagctgatcaagatgattggtacaacgttaaacgcgaagagagtcagattggctataccctgattcgcaagccaatgaattggaagccaaaggaagctaaaaaagaagcagggcctatttctgttagcaatctttcatccttcctcattaattttgaagaaggaaggttaaatttagagcagttaaatgcaattttggatatgttgccatttgcattgacctttattgatgaacacgataaggtagcttattttggcggcggtgctgagatttatccgcactcgcgcaatgctattggcaatgacgtattctcgtgtcatactgctaaaagtagaccgttaattaaaaagatttttgcgcaatttcattcaggtgaagttgacaagtatgagtttcactttactccacacaagatgaagcgctgcttatacctacgctattatgcagtacgtgataaaaatggaaagtatctgggttgtcttgaggtagcacaagatgtgacagaaattagaagctggactgaagaaaagaaaaaaatttaacttgttgggctgtgttctagtaagggatgcagcttttttctacccaaagtcaagtattatcagtgatttaatggattaaaaaaattgattttttagtttattaatgatgcgaataggtttaaagaccaaatactaaataacggaaagtactacaaataagcctatgaatacttgtagtttttccataggttgcttatacttaagttgattatttgatttcagctaaagtcttttattttcggtggctacgttgtaatcatataattgatcatgtttgataagagcaaacattgtgcgtatcagtttatggactgatgcaatggcgattttcttatagccttggctatttgaagatcgttttttcttgtcataataatcagttatatgacatggctgtgtagcctttaccgtctccatttgagtaataactcgataaagtatttttctggcaatatgattgccatgcttggtaatgccaagagaactgtctttttcaccagattggtaccttcctggatcaatgccaacaaacgcatcaatttgagctgaagtgctaaaccgtcttagatcaccgagctctgctactaatctcactgctgtaattctagcaattcctgggatactcaaatagatggataaagcacgagcgtttactgttttagccagcttttccatgtagttaattacatagtcgcgttcttgctggagtgaaaacaaattagaaatgttcctttgaatagctctaacgataatactatctttggaatcataaggataagcttctctagcaaaagcgtataatcttgtggttaagtatcgtgccctttgttgtcctattccagaaatagaattaagcatttgagttacctgtgtctcattcttttctagaacatatccagcatgtgggaaaagactaacaagcgcccaataaattctgccagatggatgagacagtatttcttcaatttgtgggaaagtggattgaaggttgcggtgcaattgatttttagtagtaactatattcctagtaagctcttcataatagcgactggcattctgaagttcatgatactctctgggctgtggatcacgcagcttttgcggagcattaaattgaattaaagccaggcgataagcatctaccttatcagttttattatgacgcaaattattgtccattagctttttcgctttaagcggattaagcttcaaatacttaatatgataatcctctaagaaagcttgcaggcttagagaataaacaccagtggcttcgaaaacaactaaaggagttatcaaatattggttcagttgctcataaagtttttgatagccaaaggaatcattagaaattttaaaagattcgccttgtttgatccggtcattaaccacacaaactgtggaagatttactgctaacatcaataccgaaaataatttgtgattccataatataacctccgctgtgaagataaaactctttatcaacctattaattctaattttctaaacacgacatctaagtgtccacagacttcgaagagacttaagaataggcggtaaagcagtccgtttcttttacgacatcaagtgtctaaaaagctgaagacttgatttgctttatcttcactttctattttagacaaaataaaaagtgtcagatcgtgaatccgtcgattcataatccaacactaggttagtatgtttcttttgccctcgtgcaaaaaatcacaattcttgctagactagattgagagaatgattaaaaagaagggaagagagaaaatgcgcacagcacatggaaaacaaccagctgatgaaatcaaattgcattggcttcttctaggccaattactaacgtggttgggttccagctttatttggccatttacttcagtttacctgcacgaccatcttggcgtttcactagctttagtgggtgtcgttttgctgttcaactgtgttgcaaatatgattgggtcatttatttcaggctggtgctatgaccatatggatccatatgtcttgctgattgtgggggctgctttagatgcggctgtcttgtttggcatggctttgaatcatagttggccgttatattggctctggatgactttaactggctttttgggtggctggaatggagcattgattaactcgattgctactagtattaaatctaagccaggtcgttatgtcttcaatatgatctactttgctcaaaatgttggggtcgtttgtgggacattagcagtaggttatctttatgattattcagtgactttattatttgtcattgctggtcttttattcgttggcgtttgcgttaacgcaattattaattatcggccaatgattcagttccacaaggagcgtttggctaacaaaggcgaatcaaagaagaaggcctttgagccgatgccaaaatacaatctgattatgtcaattggcttttttgttacgatcgctgtaatttggttgatgtacatgaactgggaatcaaacttgtctgtctacatggtttctttgggcattccttttcatctgtatagtttgttatggaccatcaatgccggaattattgtcatcgtgcaagctatcttaagtcgttttactatctttaagagcttatttagacaaattttatttggcactttgatgtttgcaatttcttttgttactttgatttttgccaaagattttgcacatttcgccttatccatggttatcttaactttaggcgaagcaaccgcaatgccgtcgattccaacttatgtcaatgatctgtcgcccgattctagtaagggcaagtatcaaggcttaaccttgtctgcatcgtcaattggtcgagctctaggtccattatttggtggtttaatcattgaagatttcggctatattcaattctttgctgttgctgcaattggtatctttttgcttttagtcatgcttattccaatgcatgcgaaactacagaaaaaactaaaattatttgtaaaataaaaacaacctgaattgtcaaattaagtgcaacagttaggttatgaagagatatattgcttgaagagttcctctgctgtgtgatattggaggattcggcgatatttgtggttaatggcatcagttgcctgttgaacataagcttttgacttgtctttcatgctcttgcccttagggaagaattgacgcaaaagaccattgcagttctcattggtgcccctttcccatggagaatatgggtgagcaaagtaaatctggcagcccttgatcttggtcatatccgcaaactcagagccattgtcaaacgtgattgatttaaaccaggcaggatgtctgtcaatctccttttgaagcagcctttggcatgtgcttgcccgatagtcaggaatcttgataactacttcagagcgtgtggttctttcagtcaaagtcattaaagcaggctgattcttgcgtctgacgcctttaaccagatctccttcccagtgcagcggagcttttctgtcttcaacctccttaggacgctgttcaatggaattgccaagatgcttcttgtgcaaagcgtgaccgccatggctgtgatgacgcttgttcctgcgtcttttgagcttcataggcagatcaatattgcttatgtccagcaagccctgatcaatatagcgatagacggttggtgtgctgggacaagggtagcctggcatagtccttttgaattcaccaacgaactcatcgatgctggtggcatcaaatttagctttaaagcgtctggagagcattctcaaaaagacagcataatgcttcaatggattgcgctgatagcagtttttgcgacgcttctcataataaatctgtgcagtatcagcgtaatagtgctcatacaataaatagctgctgtctctttgcaggacgcttccgcgtttgatttcgcgactgattgtcgacttatggcagccaacttcttgagcgataacagtacgggaagttatgccggaatccagcattgcttgaatttgtccacgttgtacgctggttaattgatgatagtgcttagaaatgctagaatttgaattggtcatgaagatcttcctttcttgatttttcgtcacttcaagtttaggtcttcatggcctttttgtttaacacttagtgttgcacttcaattttaaatccgggaaaataaaaacaacatgatagcgttaatttttttataatgctatcatgtctttatatgaaaaatttttccactagggaggtaatttaatgtattttaacgtacgcggcggtgctggtgacattactaaggctaatacttcagcgcgtctacaagataatttatatttggccgttaactcagaatggttggaaaaggccaaaataccatctgatcgttcaagaaccagttcatttgatgggatcgatcttaatattgaaaagaacttgatgcaagactttgcagattttgctgctggtaagaaggaactgcctactgtgcctaacttcaagaaggcagttgagctttacaaggttgctaaaaactttgacaagcgaaatgcggatggtgccgcacctattcaggcagatttgcacgaaattttagacttgcgcaacttcgctgactttaacttgaaggcagcagatttttacaagaatggttttgccgttccatttgctttcagtgttgaagcagatatgaagaatactaagattcactcattgaattttggtggtccaagtactttcttgccagatacgactacttacaagactccagctgctgagaagttattggatgttttgaaaaagcaatctattaagttgttaacaatggccggacttgatgaaaaggacgcagaagattacgctgacttggcaattaagtatgacgctaagattgctaaggttgttaagtcaactgaagaatgggcagattacccagcaacttataatccagtttcattgactgactttgaagcaaaattcgattccttcaagatggattacttcttgggcggattatttaccaagaagccagaacggataatttcaactgaaccacgttacttagatcacgcggaagaattgttgaatgaagaaaactttgctgaaattaaggcttggatgctggttaagtttattaatggcgtagcttacagcttgtcacaagatttccgtgaagctgcctttccatttagtcaagctttgtcaggccaacctgagctttcaagtggcgttaagcaggcatatcatattactaatggtgacttcggcgaagtagtaggtgtctactatggtcaaacttactttggcgcagaagctaaagcagacgtgactgatatgattcacaagatgcttgatgtttatgaaaagagaattcgtgaaaattcatggctttctcaagcaactaaggataaggcaatcgttaagttgcgcgctttgatcttgaagatcggttatccagacaagattgaagaaatctatgaccgtttacaagttgatccaactgctagcctttatgaaaatgaagtgcaatttggtcgggaacaaattaagtacaatcttgagaaattgtaccaagatgttgaccgtacggtatggttgatgccaggtgatatggttaatgcatgttacgacccacaaagaaatgatttaactttcccagctgcaattttgcaaaaaccattctatgacttgaaacaaagtcgtgctactaattatggtggaatcggcgttgttattgcacacgaagtatcacatgcctttgacaataacggtgctcaattcgatgagtttggtaacatgaagaattggtggactgatgaagattttgctgaattcaagaagagaacgcaagctgaaatcgacttgtttgatggtattgaatatggccctgtaaccttgaacggtaagcaaatcgtatcagaaaacattgccgatcaaggtggtttgactgctgctgttgaagctaacaagggtgaaggtggcgacaagaaggcaatgcaagaattgtttgaaaactttgctcgtgtttgggcaactaagcaattgccagaatcaattaagacgcaagtatctatcgacgttcacgcaccaggtccagaacgtgctaacgtgcaatcacaatgccaagaagaattctataaggcatttgatgtgaccgaaaacgatggcatgtggcttgctcctgaaaagagagtagtaatttggtaagtaacttttcttaatatcgagtatgaaaaattagctaaattacatataagctcctataataagaatgactacagtgctgctactacactgcagccctttataacttattacccattaataaattttttgcactaaaaaaggctccctgttgggagtcttttttagtttagtaattatttagttttagctgtcgagtaatcctttggcttaatccgcttaatgtaagatggatttggtcgacccaggattaatggtacacgctcgattacggtatcggcgtattctaagccgaaccaggaagctgggttagaagacaagttttgcaagcgaacccgcgcttccacaagccatttttcatagccaaccaattgtgtttgtggactgatgacgtcgttaacaataacgaatgagaagtcacctacgtcacgacctgggctggtggtgtattcctgtggttgtggctcaatcgtaccgtcggcgatcaagtcatgaacgatctgacgaatgtagacattcacactagtttgcttcttaaagccgaggtagagctgaatgttaattacgttcttcgtaccgtaagtgttaacagcatattcagcggtaaatggctcgttagtaacattgacagtgacaaaccagtaagcctttgctcgtttaggtcttttatccaaaattgagtacaggatttcacgtttgatgaacttattgtacttaacgttggccatgtaaaccaagttggtagcataagttgggtaattttcatcgtgacttaagttcgttaacatgtcggtatattcatctaagcgaacgtaagcattgcgagcttcacgcttgtcacgaaccttgttgccgtaataccaaacatacattacgaagccgatagcaccagcgatgaagagtgaaacgtaaccaccatgagtaaatttagtcaaacttgaaatcataaacatgatgtcaaggacaccgaagaagatcaagaagatccagttccaaacagtgttgactttcttcattactaaccattcataaagcaggatggtagtcattaacattgaaattgtaatggacagaccataagctgcttccatgtgagctgaagtttggaaatataagacgattgcgatagtagcaacacagatacccttgttaatggaaggaatataaatttgtcctttttcgttagatgggtagttgatgttcattcttggcaagaacttcaagcctgaagcttctgcaactaaagtgaatgaaccggtaattagggcctgagaagcaataacagcagcaatagtagccaaaatgatggcaaacaatctgatgttagctgggatcatttcaaagaatggattgagcacaccgccgtctgcaggacggtaagttgggttgttcaaaatccaaacgccttgaccaaagtagttgagtgacaagcaaacaaaaacaaatggccaagaaccaataatattgcttttaccaacgtgaccaacgtctgaatataaggcttcggcaccagtcgtagctaggaaaattgaccctaaaataaaaattccagccttattatatggactgactaataatctaatagcgtaaattggattgattgcttgcaagattgaccagtcaccgaccatgttcattacgcccattacacccaaaaaagtgaaccaaaggaacatgattgggccgaaggctttaccaatgatactagttcccattttttggatagaaaacagaactagcagaatgactacagtgatggcaataaccatgttttgagtagaaacgggtacattgccgccaaagttcagtcctttcagtccttcaatcgcagttgtaactgtaactgctggagttaaagtaccatcggccaaaatagcggctccaccaattagcgctggtagaactaaccatttagctcgttttctaaccaatgtgtataaggcaaaaatcccaccttctccgtggttagttgccttgagggcaataattacggtttgtaaggtagttagtagcgttacagtccaaagaaccaatgaaattgatccaatgataaagtcacgatttacattaccaatgccgccgttgccttcgacaattgatttcataacataaagcggactagtaccgatatcgccgtaaacaataccgatggcgattagtaagccggccgcgctcatgcgtttagctttattattcattatctcgttatctcccacaacaaaattgtagttttaataaaaaaagaaaatgccacgatgacattttcccttattgtacctattttcgtctatttcgctggacaatgcaagtgagatttgtcagaaattgaatctagaatttggtgatgataaagttaatgcattataataaaaaatatgcagtaaaaaagctcccatacagggagcctttttgatataaattatgaaagtgatgaaggaatcttagtacgttggtcttcgtcccatttttcccatgcttcataagtaagcatttcttctggcttaacaccagtcttttcttccatggccttaagcaagtccttaaagttgtagtcgtggtattgtaacacatgatcaaccaacttcttgcgtgggaagtggatgttgtttaaaacatagcgattgatatcaaccatgttatgattttcatcgtaaaggttgataacttcaagatcgtcttcatcgaattcagcgatgtagaagttagcgaagacctttaagtaatcaggttgttctttgaattcttcctgtggcatagtagtcttgttagcttctggcattacgactttaaagtcgtcgttttcttcattttctttatcagcttgagcttgagcgttcttttcttcttcagtcaaagttgttacccctttatttataaataaatagatacaaagtcaataataattttacagacttctacaaataaaagcaaatagaagtggttgagagatgcaaaagtatagaagtcagttttgattagtaaaatggagtaaaatgaagtaaaatataaatgtaaaaagtaaaatgaagtaaaatgaggaaaaatatgtataatgaaaatccttttgatgctgaatttggcgggatcccagagctatatcttgattttaatgatgatgcagttaaatttgctcaaagagcccatcgtctcaagaaacatccaacttattctctctttattacaggggtacgaggttcaggaaaaacagtttttatgaacaaagtgggtaaagaactaaaaaaatataaagatactatggtagtcactttgcacaattctgatgatctttttcgaatgatgtatatcaagctagtgcctatgctagataaaatcaaaaaatggacgccatcaatttctattaaagttccttttgtatcagtagatttcactgaagcaaatgaaaagcatgatgaaatatattataaagtagaaattaacaagattcttaaagctttgaacaaagtggggattcgtgttgcattttgtattgatgaagtgtcaaatacacccacaattcaaaaattggctgaggaattcaacgactggagcctaaataactatcaagtttcagtgattatgaccggactattaagtgaagtggcggaactatcaggcacacataatttaaccttcttggttcgggcggatagatttcacgtctctaaactatttgcgtcgtcaattgccagaacttacatggatgtattagacataacagctaagcaagcagaaattttggcagatatgtcaaaaggctatgcttatgcatttcaattgatcggagatttgatgtatgaaaatttaagtcaaaagatgacgtttgaaaaagctttggaatatactaaacttagattccgtgatgtacttttcaaccaagcgtatgatgtaattgctcatgaattaacggatgtggattttcaatttttgtacgctatggcgcaagataatagtattagttcaattattaggactatgcaaaaaagtaagcagtatgttaatagctatcgtgcaaaattaattaaatatgatctaattaagccaataattaggggaaaggtcggctttaccttacctttgtttagagatttcattcaagcaaagtatgatgagcttaactggggctagaatttattgaaaaaattcggcagaaaatcacagaaatgaacgcagatccagtttggagggatactattatggactatgagactaagctagctgaagagcgtgaatacggtgaagaaaaaggaattttaagtgcaattaagaaaattatttatcgtaaccggagctatggtgtatcagattccaaaactttggaggatctgacagaagactaccatgattctgtttcccgggatcaaattgaacaaatgatgaaagaagcctaggtctaatgaaaatagccgctgctcaatgtgagtaacggctatttttttacttgttatcatcagcagcagagctggaacttacggcagatgattgatcgttgcttgaggaagccgcgctggattggttgatggatgataatttaagtaattattcttttgaaaaaatatttcttacttgttggagtaaattatcgaattctgttgattcttttatgtggccgattatttttccatgacgggcaatgaaatcatacgatagcatttgaaataataatgcatctccatttgtgtgactagcataatctagcacatagaatctaaatggatcatctgtaatatggttatgagtaattgctagtcctattactaatccagactttttagtgtaagcatgtctgctcactactaaatagcgtctacgaatatttcctttttcagaatcatgtccacccatttcgtgaccagcatgtggttcagcatcgatcattattatgtcaccttgatggacatcaatccttctcatttgctagttcctttccgacaggtttggcttctctaggattgtatcctaattcttggtattctcgctttatttcagtatcataatcataatcgtcataagcggggtctgaccataaatcataattgtttttagcaattcttttgtatacaatatcaccgtttttatttacatcaacagagaattctgtattaagtggaactttgatagtacttggaatggtaagcactattgaatttccttgttttctagccttgactaccataataagccctcctcgtattatataaattgtaattagtcatattgtgataattaatcaaattagtatttgctttttgatcttcacatgttagcctctaattgtcattggctttggtcaactggtctaggttatcacctcctgcagttttgtctgctttataagtctgccacccagacagttcctttatgctctaactcacatgctgtattgattgcttctttttgctagtccttgagcaattgggattaggtgcagctttcaaagaagcaaccagtgaatacttatactggcgagattgaacttaagaactgtaattaggggttaacatgtgaagatcaaaatctatgatcagaaatttgaaagaaaggaggccatttccaatgaaattatttgtcggtattgatgttagttctaaagatttacaggtcgttgcacttgattcagaagatcaaaacaaacgcttaattaacgatagctttgtcaatgatctttatggtgctagtgaactgaaaaaacaaattttagatctagctcaaaataaacactatgatcaaatcattattggcatggaagctacatctatttacagttttcatcctgcttactttttccaaaatgacgaagatttacaaaagctcaatgtagagactgatgtaattaaccccaaagaaaccagcaggtttcataaagtctttgaagaaagtaaaactgatcctctcgatgcttattacattgctttgtatctaagctttggacattatcgagtaagcattgccagacaagacaactatcttgctttagagcgtttaacgcgtaccagatatgaattagttcaagaactgactcgtaccaaacagcacttcattgaagctttatattatcgggttaataaactaatcactgtcgataaagataagattaatactcctcttttcggtgctacaatgatgtctattgtaaccgatagtaaaactctggatgagatcgcggatatgcctaccgaagacttaatttcttacttacaggttaaaggcagaggacgcttttccgatccagataccttggctaaagcaattaagaaagctgttagaggttcatatcgcttaggcaaagtaatgactgattcaattgatgcagtgctttctgttcattacaacatgattcaaagctttaatgaatctattaaagatctagaaaaagcaattgatcgtatcgttgatgcattaccagaaagcaaaattctggaatcaattcccggtattggcaaaacctatacagctggtattatcgctgagatcggaagtatcgatcgctttgataaagaagaacagctggctaagtatgccggcctaacctggaatcaatatcaatcgggagatcacagcaacgaacatactccaatggccaggactggaaacagatatctaagatattacttgattgaagctgtcaatctagcaagattacatgatcctgttttcaaaaaatattaccaaaagaagtatgatgaagctgtctactcgccgcataaacgtgcttgcacattaactgcaagaaaattagtacgagttatctttaaattgctcaaagatgacaaactgtacaggacaccgaggtcttaatttcaaaaattggtctaaatttaaaagtaaacaaaagtttaacattaaaaaaatcaacctttaccaaggcttagtttcatatactcaaatttatgatcaaaaagaacaaatatcatcgcctttcatttgacttattaccacatgacttatgctaaaaatattttattatttaagtatatactgtgaatacagtgagcacaaacaaaaggagccacaaattggctcctttttcgtttgcttacttgttatcatcagcagcagagctggaacttacggcagatgattgatcgttgcttgaggaagccgcgctggattggctgctggatgattgttcctgctggtgatcgcttgaagaagatgaagaacttgattgatcatctgacttcttgtttgatgagctggacttcttggactgctctttatccttatcagatgaggattttgcagaatcatcctgactagaattatctttgttagaatctgcatcagaattattagatttttgctggtcaggatcagcgttctttttattggaattattataggaagtattattgtgcgtttgagtgttggcatggctaatgtaagcaccggcgccacctccacctaagatgaacatcgcagcaataacaccccaaaagactaatttcttcatattaagacaactctcccttatcttagaaaaaatattaacgaatttgagccaattggtgactttgaatcgttagttatagtgtaagacatctggccggcaggttgattacaaaatactcaattttaactaattattaagaggtagaagaaaaatatgaattacgaattaactgaacaatcaatccaatatgtatttggcaacaagaagtataagaatgggcaaaagacccgtaacttgaagaacgtaaagactggcgctaaggcagatgagttgcaaaaggtgggtcaagcaattgctagtttgcaagaagactcacttgatgaagcatacttagtgcagaagtcacgtcttgtaccagcagctgaataaattaacgaacatatttaggaaataaggagaaaaaatgatggctaaaactactaagactatgaagttaactttcttgaacggagaaaagaagaaaattagtattacgttgggggatgcagtcgataatctaactgcggatcaagtacgcggtgcgatgaacacgattgcggaagccgatgcattcgagaaagacggtgttgcatattatcacactcctcaatcagctgcatacattgaacgcactgttactgatatctttaatgattcagcagaatctgcagttgagcctgcagctaagcaagactaatctggacttgcttgaccaactaattagcttggtcaaaaggctcaggagaaaatatcgcaagatgtagagttcacacttagacctttaacagaaatcgtatagtaatattactttttcaattgattttgttacatcgttgtaaaatttaagaaaaagtaaagaaacagtaaagcgggcgtatgctcgctttttcttgttgtgtctaggattacggcattttgttattttagatttgtgtgaatggtattgggatagggaataggtgaattattacaaaagcaagattgtagtcaatttaacttgctattttttcaagaggttagtacaatatgaatcgtggtaagtaataggacgtgcttcaggcgtgtcgcctgtacgcatgctgatccttcagcaatgactactacctcatgagagttataaactcatggatcttgctttgaagaattttgtacattataggctccctacatgctgaacctatggcctattacattttttatatttcaaggaggaaaagaccacatgaagaaaaatttaagaattgttagcgctgctgctgctgctttattagctgttgctccagttgctgcttcagctgtttctgttaacgctgctgcaaccactaccaacacagtatacactgtaattaatgctgatggtaccgcaatcaacactccagctgatgcaaaatacgatgttgatgtaacacctaaccttactgctattgcagcttctactgtaaatggacaaactattaacggtagcattactggtaacattactgctagttacaatggccaatcatacactggtactttagatactaagaatggtaaagtttctgttattgattcaaagggtaggccagttattcattttggaaagcttgctaatggtttatatactgttactgtaaagggtgtatcattcaactttggtactgctaacgcaaacaatactatcactcttggctcaaagaacagcaatgttaagttctcaactgatgagggtaagagctttgctaacactaaaaaggttgaacttaaccaagatggtactttaaagaatcctatttcaattaaagtttcaaacgttaatgcacttgacctttcaaatactagcggtattaacttctacaacgcttcaaacggttcacaagtaactaagggttcagttaatgtaactgctagtgttaacggtcgtttgaacgtttcaactgttgctagtgaaatcttaaagaactttgctgcttaccaagtttcaaatggtaaggctgtatcacaaatgccagaccaaaaggctgtagttgctgatgttaacgctgctttaaaggctgctaatatttcagttgacaatgctggttggtttactgctccaacttcattctcagttaatgtaaaggcaacttcatcaattaatggtgttgacgctactttacctgtaaccgttaatgttgctaacggcaaggacatgactgtaccaagccaaagcaagactattatgcacaatgcatactactacgacaaggacgctaagcgtgttggtactgacaagcttacccgttacaactcagtaactgttgctatgaacactactactatcaacggcaaggcttactacgaagtaatcgaaaatggtaaggctactggcaagttcatcaacgcagacaacattgatggtactaagcgtactttgaagcacaacgcatacgtttacaagacttcaaagaagcgtgctaacaaggttaccttgaagaagggtactgaagtaactacttacggtggtacttacacattcaagaacggcaagcaatactacaagatcggtaacaacactgacaagacttacgtaaaggcttcaaacttttaattaagtctatgtagtagataaggaaaacgaggcaaatgcctcgtttttcttttgctctgaaaaaaggcgccgcttacgcgacaccttggaagatattctgctgtgaactattgattactgtttactgatagactttatgtactagtttgataatttcatcgcggttaagcgtctcgccataactatttgtgagttcttgtagggctgtatctttagttccgtccattcgcttaatagttaggactagcttcttagcatcttctatttttacttttttagcaacctcattcatttcgtattctagcttgtccatgtcttcgacccactttccgctattcacgtaatggtcgacatccttttgcaagctggcgatgtaaccttcagggtgattgatgattccattcatgtaatccaagaagtcaatcatcttttggttcaggtcatgattattgcccttagaattaaaaactttaacgtgcgtaccagtctgaaattcaattcttcttattgctcatgacgtgaccaaagaccaaatcgtcagtgattctcggatatcgactttttattttaatcatattttacctcatttcaattattgttccatcacattacgtaatttacctaaaagctgctttttcaatcgtttcaacgtaatacgcggtataccgcattctttaactagctgcgtaattgtctttttctcaagcaaatgctcaaaaagaattacttgctcaagttgacttagtttcttaatctcattctttaaagctacaagattatcccatgcctctgttttacctaagtcataagccttgtcaattgcagtattgcgttcacatacgcgctgttctcggcgcagagcatcaattgtctgccaaagaacccttttgaagctaagcttattaatctcactgcgaaccttttgcccatctaatttgcgcaacatctcggcatacaaaattacaccttcttgcaacagatcttcatagagatgatagtccggtcgaacatgtgccgcctttaaggcaccaccaactaacttacgatttttccatgcttcttcgaaatatttttgacttgtcattgtgacactctcccaaatgatgtcacaagcgcttgtgcaatattagattagcaagattaattattgaaaaaaactaggtggtgggtcctcatgagcactagagccatgcaggtttgcatatttcaataaatgctgaaatcaagtccagcaatacctgactgagtacaattaatagtaaaaaaattgcaaaaaaaatacagctcatgagagctgttaacgattatatctgatcttaataatctgcttagtaaaaaagcggtgttcacggtgcaaataatctaatggcttaaattctttcacaattgtaagtaggtgtaagttcaaaacatgattatagaatttgtctgctagctttttaaaactatcaatagcatacaagtccagttgcacataatagttggaattatgcaggattgagtcagaattaatggctgttacgcgaagattattttcttgcaacatatgctgataatacaagtcagaataataatgattatgaaacagatactgaccaattatcttagtaagattaggcttaggcgaatcaaaggcaaaattatagaccaagccatttttatcaagtgcaatactgttgaaaatagcttgatcatggcgtttaacgtggaagtctttaatccagtgcaagcaaatccagtccgtgaagaaatttccactaaatgcatgcattgaaaaataaagcacattgtacatgacaatcccttgatagatatcaactccagcctcgcgagctagcattctctgccaaatcatatcgcaatgtacggcatgccgcatcaatccttgcatcatggcatatgttgacttctgactaagcacaattccacgattcaggtcgaaggctaccgccttatatttgcctaagataggatgttgcttgaactcatagactgccaatgtgttcttattgagtcgatatttattgtcatacgtaatgtactgcgctagttgcgcgtcattctcaattctccatttggtaaggtccttggaccaattacgatattttatgtcagtgggcaagctaataatccccaagttacgttgcttgtaggctgacacattcatcacactccctatgtttgaatatatctatattattttgaatattgaatagtattatacaggatgaagcattgattgtatagctagaaattattatgctgaaaagcttattttttaattaaacagaaagctgcaattaagtctacgtaccaaactattaacgtagacaatcatgcagatatattacaggatggcttgactaaaattataattaactcaaacggagttcctgacggaactgagactgaaacattgctgaatttagtcaaactcatgaaagatttgccagtacatggcgataaactttttgatagggcacaaaaacgcatcgaatcaatgaatgccgatccagaatggagggatactattatggactttgaaactagaatgcttgaacgcgagcaagttggtgaaaagaaaggccttaaaacaggtgcacttaccttagtcgcttctttgaaagatgttggctgcaatagccaacaaatcctgcagcaattaaagcaaaagtatggcaatgtattttctgataagcagttagaagaatttctgaaacagagctaggtcataacaataatattttctgagggtgtcgcaacagcggcgccttttttagagcaaaagaaaaacgaggcatttgcctcgttttccttatctactacatagacttaattaaaagtttgaagcctttacgtaagtcttgtcagtgttgttaccgatcttgtagtattgcttgccgttcttgaatgtgtaagtaccaccgtaagtagttacttcagtacccttcttcaaggtaaccttgttagcacgcttctttgaagtcttgtaaacgtatgcgttgtgcttcaaagtacgcttagtaccatcaatgttgtcagcgttgatgaacttgcctgaaagcttgccgttttcaactacttcgtagtaagccttgccgttgatggtagtagtcttaggtgaaacagttactgagttgtaacgagtcaacttgtcagtaccaacacgcttagcgtccttgtcgtagtagtatgcgttgtgcataatagtctttgatacgcttggagcaacttcttctgcaacgttagcagtagtgaaagttacagtcatttcagctgacttaccgtttgaggtagccttaccttctgaagtagacttaactttaagagtgaatgagtgctttgcgttgaagttaccattagcatcaacagtaataccttcagccttcaattgatcagcaatatctgatgaagctacaattggataagtttcaacagctgggttgtcgtcacgaccaccgttagtattgttgttagcacctaaaactttttgtacagctacgaagctactttgaacagctggaagtaatgctgaaacgttaagttgaccatttgcgttagcaacaacatctacgttacctgcagttacaggttgaccattagcaacgttgtagaatactacgttgttagtgttagttgcgtctaatgcagtcaaagtaccgttaacaactaacttgtttacagtaccgttgttgtcaagcttacccttaatagcagttgccttaccattagtagtagttgcaacagtccaaccagcagcccttacacttgcttcgtcaaatgagaatgggctgttctttggcatagcaagggttacttccttaccagcattgttagcaccaaagttgaaaccaatgttgttaactacaacgttgtatgattgaccagcaactaacttgttaaggttgttaacaacagttgaagcagtaccgtcgtaaattactgagttgtcgctagcagtaatcttaacgtttgcgtgaccgttttggccgtcgaacaagttagctgaagcagtagtaccgttgaaggtagctgagattgaaccagtcaagttacctggagtagtcttagtagcaccagttaatgagaaacttgggttaacgttagtaacattgttggttgaagtaacgttaccgttcaagttaatgtgtgagtaatcttggttgctgttagttgcgttaacagtagtgttgtcagcagcgttaacagaaacagctgaagcagcaactggagcaacagctaataaagcagcagcagcagcgctaacaattcttaaatttttcttcatgtggtcttttcctccttgaaatataaaaaatgtaataggccataggttcagcatgtagggagcctataatgtacaaaattcttcaaagcaagatccatgagtttataactctcatgaggtagtagtcattgctgaaggatcagcatgcgtacaggcgacacgcctgaagcacgtatattgtgtaatcgatttttgccaagcaatgaaagggtggtttctgtcctcttatttgcttggggttggttgggtgggttttgtccgctgcgcagatacttttgtgaaaaaagagtacgatgcgatttgatgatttagagtgtcgtttttggttttgttaagggatgcttgtaaaataataaggtaaagaaaatctaaagaagtaattttgtgaaaaagaaatcgacattttttgagactgtaaaatagtttgtgtaaggatgaatgattccttaaatttatttctttaaacattagaaaaaggagttcctttctcgtatgattggtttgaacaaaaaaacacatacagaaagaagaactccttcatgaatgattttaccaaagattttgctcaagctctattcaatccagacaaaataaatgatttattgcgcaaagagctacaacaggctgttaataacttgttagaagctgaattgactgcctttctgggctatgatccctatgccagaaatggctggaatactggcaactctagaaatggtgcttatttccgcaaagttgatacgcaatttggcccaattgaagtgcaagtgccccgggatcgcaacggtcaatttcatcagcacacgctgcctggctacaagcagcactcggatatcttggaaagcatgattatcaagctttactccaagggcgtgaccaccagggaaatagccgatctaattgaaaagatgtatggcagccattacagtccagctcaggtatcaaatatttccaagcagatgattccaaaggttgaggcttaccacaaacgcaagctaagcgacaagtttttctgcgtctatttggatgcgacataccttcctttgcgccgagaaacatttgagcgtgaagcagtctatattgccattggcatcaagcctaatgggcacaaggaggtcattgactactgcattgcacctagcgagaacattgaagtctggacagatatgcttcaaaacatgaaatcccgaggcttaaagcaagttgagctttttctttctgatggtgttgttggcatgaaaacagccttggccaggacttatcctaaagctcattttcaacgctgtttggttcatgtcatgcgcaatatctgcgctaaagtacgcgtcgacgatcgtgaaaagatcatgaacgaattcaaacaggtgcatcaacagacaaacaaagaagaagccacagctgtcctgcatgacttctataccaaatggggcaaggtttacagccatgttatcagaagcttgaaagacatagaaccagatctgctggtcttttataactatcccaagcagatcagagcttcaatttattcgactaacatgattgaatcatttaacaatgtgatcaagcgcaaagctaagcctaaggcagagtttccaactgaacagtcgcttgatgcttttattggcattcaggcaatgagctacaatgaccgttatttcaatcgaattcataaaggcttcggtcaggttcaggacaccttagaatcctactttgattaaataaataattaaaaaatcaatttacgagaaagatctatttacacaaaagatttgacagtttccattttttgcgtacttatatattgtcaaaattaagatatgtaggtgataattatgttaaataaaaaggataaaactaaaattcaagaattaactgataaaacagtggacttgatcgtagaaaatatggggaaatcgcgtaaagaagcggaacaagattttcaaaagtcagatacatatgcgttcttatggctagcgaagcgtaatattgaaaatgagcaccctattattttgtacagaatgtttaattctgagttaaaagctaaaccaatagatgaagaacaacaaagttttattgactttatgactgataacacaatcgagttaattacacagaatactaattgggggagataaaaggcaactaaagttttcaaatctacaaaggtatattggatactagttcactcaggacataatttagatgaatcttctcccgaagagctgttttatatgtttagaaataaacttagtataggtaatccactaccttcatctacgctgaagttaacttattaaaaaatttatataagttaaataatattattacaaatgttacttttttacaataaatctgttgaaacgcttgtctagacctaatttgctagatacaatggaggtgttatattaaggaggataattttttatgaagaagagacttttgaccagttttgctgctgccgcaatgcttacttctgtagctgtgccagcagtaaatactacgatgatgaatcaagcctcaagccaacgagtttctgccgctaccgctgatcaaactgcatttttgaataaagctgctaagcaagctgtgaaagcagctaaaaaatatggaactttgccatcagtgatgattgcccaggcaataactgagtcaggctggggaaagtcaggattagccgtgaatgctaataacctttttgggatgaaggctgatgattcttggacaggtgagacttatactgccaagactagagaagaagataaaaacggtaagagctactatattactgctaagtttagaaaatacccatcttttgaacaatcatttgaagataatggtagtaaattaagaaatggtgtttcttgggatccgttgcgttataagggcacttggattgaaaatgcatcaacttatgcagctgcaaccaaggctttgaccggtacgtatgctacagactctaagtatgataaggcattaaatagtcatattactagttctaatttgactaagtatgatccagtaaccgttaatactactagaacttatactgctggcaaggatagttcaacttataattggccaactgctccatctgttgccagtgctattggctctgttaaagctggtgaaaaagtagtagttaccaagactattactttccatgatggttcaagcagaatgtatattgatggtcgtggttgggttaatggctcagttttggacaagagcagttctgcaactaaggaaccagtaactcaggcacctaagaatgtgccagctgtttctaagaacttgatgcataatgcctatgtttatgaccaaaatggtaagaagctaaagggcaagatgtacaagaccagtgatgaaaacggtggtaagtggatcaatacttatggtaccaagaccatcaagggtaagacctactaccgtgtcggtgaaaatgaatacattgcagctggtaatattgatggtagcctcagattcttgaagaagaatgcttatgtttacaatcaatatggcaatcgcgataacaatttgaagcacaagaagaatagccaaattgctacttacggcagtgctataactatcaatggtaagaaatactataaggtaggtattcgtcaatacgttaagaaatcgaacttcatgtaattaaggaaagggctttgttgtgaagatacgcaaatttttaattgccttaattgcgcttttggggttagtcggcgtatcatcggtcagtaaccaggtcaaagccgcttcgattaatactttagcgaagaaatatcaatatagtggtgtcacctatttatacaagatgctcaaactagaggggattaagtacaataaattccctggtgttgagtatcaaaatggcaagccagaaggaattgtcgttcatgagactgacgatcctggagctactgctcacgatgaagcaatctactttaaccgcgagtggaaaaatatcaacgcttacgtcaatgcttttgtagatagtaagcaagtcatccaaatgtattcacctaataatggtacttggggcgcaggactgaatgccaacaatcgctttattcaaattgagctttgtgaagaagatagtcgtgatgcctttgctaagtcagttaataatgatgcaatttatattgccaagttgcttcatcgttacaatttaaagccagacaatgcttgcgatgatggtgaaggcacaatttggtcacacaaggcggttagcaccttcttaggtggaacagaccacgttgaccctgatagttattttgccaagtgggattacgacatggatcagttttattctttgatcgagtattactatgacttgcaaaagaagaatgaaaatactgatactaaggatccaaataagattaaggacgaagtaccagcagaagttcaaggtgcggtaactttaggtcacgatgcttatgtttatgacaagaacggcaagaagaccaagatcttgaagttagctggtagtccggtaaccgttttaggctacaagataatcagtaataagaagtactatcaaattggaaagaacgaatacgtagtagctactaatattgatgctactgctagaactgttaagaagaatacatatttgcggactcgttcaggtcgaattgaaaaaggtaatttggtcaagaagggtagtcgggtcatgacatatggcagcaagattataattaaaggtcaaaagtattatgctttaaatgctacacaatatgttttagttagcgatattaattagaaaaatacgtcttaaaccataaataatgggaattaagacgtattttttgtataattcttgtgttgaatgtgaaaagaggagaatttaatggcgcaattatcattatttttggtcgtcttattagcgctcgtaattccaatatttatggcgcgtttcaaaataagcactgtaccaacggcgattgctgaaattatcgtcggaattattgtaggttcgagcggatttaatatcgtggtttcgatacatgatttaacatttttatcgaacctcggcgtaattttgctgatgtttttatcaggaatggaaattaattttgacctgctacagcgcaagaataatcctaaggctaaatcacaggcgggaaaaactgtcgatccgttgccaacagctttaacagctttcgctggaattgtggtaatggcctttgttttggcatatgttttaaagctgatagggctatttagcaatgttatcttggcagcgattatttttatgaccattgcattgggtgtagttattgctaccttgaaggaaaaggatattcttggccgaccgattggtcagacaattttgttaactgcggttttgggcgaagtaataccgttgctcttattaacgatttattcctcagttaatggagggaatgctggccagctttggttgattatcttactgtttatcgctgcgattattcttttgcggcggtttaagcaaccgtatttatggtttagcaaagtaactaaggcaacgactcaattggatattcggttagccttcttcttgatttttgctttagttactgtagctgagcgagttggtgctgaaaatattttgggagcattcttggccgggatggtaatgaaattattggaaccaagcgaggcaactaaagataagctaacttcaatcggttatggattctttatcccaatctttttcattatgactggcgtgggcttgaatctaaagtcactatttgctcatccatcatcattgatgttgttgccagttttggtcattttcttgttcttagctaaagctcctgtagtttttctttatatgcgctattttgaaaagaaaaatgcctttgctggtggctttttaactgctactacaattacgattgttttgccaactctacaagttgctagaaaattgcatgcaattacttcaacacaatcagatgcctttatcttagctgcggttattgtttgtatcgtgagtccgattgtctttaattcaaactttgttttatcacctgaggatcggatgaaagaaactgttactattgtgggtgccaatacttttacggtaccagttgcacatgatttgcatgataattggtatacgatcaagatgtttaccgatcagcaggaccaatgcgaaacttatgatagtagggttaaaggtttaacattacttgataatttggataatcaaagcttagagcgtagtggtgcctttgattgcgacattttcgtagctgcagggcatcatgatcaagaaaatgcacgaatggcggaatatgccaaagacttgggagtcaaacgagcaattgcccgaatgaatgaagtcgatagcaatacgatggctcgatgccaggaggcaggagtagagttgttcaactttactaatgtacgttctgctctgatgcgagctttgattgagtctccaacggtctacaagattatgactgatactaacaatgtgttgtactcagttaaggtgagaagtacttcctatactggacgaccacttagggatctggaatttgtggacaagattacggttagtcgaattcggcgtggtgatgagtggttaataccacacggttggactgttattgagccgaatgatatcttgatcttttctggagaatttaaggttgctgatcgagtaaagaagttacttagtcatcaaaattagagataaaaagaggctaaatgcaaaaatcctgcatttaacctcttttttacgtaattaatgattttgtccttcaactgcttcaatgtcgccttgtccatcgcgctcaacaatagccccaattgcagcgattaagcctttaacaatatcggctaatgccattgatggagtgcttggtcttttgacaacttgttctggcaaaaatgggatgtgaatgaagccagctttaaggctagggaattctttagctcgcatgtattgcacttgataaaagatgtggttgcagacgtaagtaccggcagtgttggaaactgtagcaggtagaccaacagcgcgaatcgccttagccattgccttgattggtagttgggtgaagtaagccgtgtcgccatcggcttggataggttcaccgagcggttgataaccatcgttgtcggggatgcgaccatcgttaatattaatagctactcgttctggggttaaagcagcacgcccaccagcttgaccaacattaagtacataatctggtttttcttgcacgatggcatcatgaacaacttgggcagatttattgaaaaccgtaggaatttctaatttgataatttttgcacccttgattgagtcaggtagttttttgactgcttcaatggcggggttgatcttgtcgccaccaaaaggatcaaaaccagttactaaaattttcaatggcttttcctccaaatttaaatcatagaattttttgctttagtcaaaatttgcattgtctctaaagtattgacaaatgcttcatccgctttttgcgtatcgtgttgatcaatcatctgggcaaaagtattaaattcagctgccattcggtgcggatatttatttaaattataacgcttaggttgctcatttctcatttcaactgtgaaattatcaagtgttcccgttgagccgtcaaaatagatactacctttttcaccttcgataaaagaacgtggcgttacatagctatcttttgatgccgtgagggaggcttgtttgtcaggataagagaggtgaagaataccagaagtatcaacgcctttttgcatgttggcataatattgcacttgatcaggcaagccaaacaatgccgagacaagatgaatgttgtagatatttaaatccattaaagcaccgccatcttttttaggatcaaaaaccggcgcaattttgccttcaagaaaggcgtcatagcggctagaatattgcgtataatttaggttaacaatatgaattggtgcgatcttgttcaattctttttggatttgtttgaagttttctaaataaaggttagtaattgcttcaacgatgatcaaacccttttcgtcggctaacttttttaattcttttgcttgagtggtgctctgaacaaatggcttttcacagattacatttttatcgtgttctagagcagctttagcaatctcataatgcaagaagtttggcaccgctacataaactgtatcgacttcagaatcagccattaattcttcattgtccgtataagtacgtttgatgttgtactttttagctaattcccgggcaatattttcactgcgcttagttgaggaaatagccgttacagtcatattcgcaacttgatcagcggttgttaaaaagtcatggacgatcatgccgctgccaataattcctaatttcatttttttgcctacttctttttagtattagtggttggtaaatctttagcgttagttgcagagtctggtactcttaagaagtcatggctgccgaagttgccataactttgaccaactttaacgtacattaatttacctagtttcatattaacaaagacattaaaggtagataatttattacctttaattacagccttaacattcattgattggtacttgcctaattttttaatttggctgaaaattttagcttgatttgtactttgagcagtagtgtcaaaaattggtgctgctgcctttttcatcaaagcttggtcagtacttttagcagttaaagtataagtgtaaacaccatcttttttgctttttttcattttataagcagaaaccaacttatcacttggattggtgatcatgtggttattcatgatggcatcggttaagtcggcataattatgaccggttagtttttcaaggtcagccttgtaccaagtatcttgtccattaatgtagacattgttaaggttgacccattcctcagtagaactagttttacctttgctagtggtttgattggtgatgtggtaaacagtggttttaccaccaaaggtagtgttagctaaggcaacttgattagaagtgtcggtacccagagtaacagattgaataacctgtcccgacttgaagctacttttagctttttgtacaacttgagtcttagtcagagctgaagtagccttcttctcttgtttactgcagccacctaataaaaagaggacagcaaaggataaaccgataatcgttttcttaagtttcatttttttctcctctatgcttcaataagtctattataactaaaaagtccgttgctcgttggagttacggactattcttttactttattttgtattaattttgcctaaatctacggccgatttcttgatagaagcaggtaccgtcaactttttgacttgattaatttgatcaatctgcatggtgaaattctttttgtgtccttcatccttataagtagaagtcacattaacatttttgatgtcgtaattctgatctacgttaattttgatttcgttgctgattggtttaacatcatcaagatcgatgccgattaaagcagtaaaggcagaatcagatacaattgcgttccaaatttttttgttatttcctttataagtaagcagataatcattgccgttttgctttaccttaaaatattttgcgttagggatgaaaggcatgagtaatgtgccgttcaaattgtcggtaatggcaccataggcactagccttagacaactttgtcttaaaccaacgctgagaattggtacctttcatttggatatatagttgcttttaccctcaatccacattttatagtgattagagctgctagaaacattagcataaataatcgttggctttttagtatattgggcttcggctttttgcaaagacttgccattgcttaattcattccaagtagcgtgcattgaactgaatttcgttttttctgcactggttaaaatcgtcttggcagtaggtaaattagctgtcttttttgaacctgtcttagagcaggccgttaaaaagagtaatgctaataaaacggtaatgataatattttgatgtttaaatttcatacataactttctttcattaaattttttcttctagtatagcaagaataacgttacaaaattgaaaaaacacgatttttttagtcttaactctatgaaaaaatttgtgaaatgtgtaaaatatggatgaaacattgaattttaaaaggagatatttcatgtcaaaattagttttaatccgtcacggtcaaagtgaatggaacctttcaaaccaatttactggttgggttgacgttaacctttcagaaaaaggtgttgaagaagctaagaaggctggccgtttaatcaaggaacacggtcttgaatttgaccaagcttacacttcattattaactcgtgctatcaagactttgcactttgcacttgaagaaagtggccaactttggattccagaaactaagacctggagacttaacgaacgtcactacggtgctttacaaggtttgaacaagaaggctactgctgaaaagtacggcgatgaacaagttcacatttggcgtcgttcatacgatgttttgccaccagctattgatgatgacaacgaattcagtcaagcacatgaccgtcgttacgcaaacttggacccacacatcgttcctaaggctgaaaacttacacgtatgtcttgatcgtgtaatgccattctgggaagaccacattgctccagatttacttgacggcaagaacgtaattatcgcagctcacggtaactcacttcgtgctttgactaagtacatcgaaaacatttctgatgaagacattatgaacttggaaatgaagaccggtgaaccagttgtttacacattcgacgaaaacttggatgttgttaacaaggaaaagttggacgactaatttattaagtagttattcacacaaatagaacttcggcgtaagtcggagtttttttatacaccaaaaaaggcatcaccgttaagggatgccttctttgtatcaacttgctccaaaaactataattatttctttgatttcataatttttttggaacaacttcattatattataaataaagaaagatcgccatttttttctaagaaagtggtgaaaattgacagttgtatatgataagtgctattttgagttacaggagtgtagaaattgggagaaaaatatgcaaacaatcgataattctctctttcaagtctctgtcgatgagaatggggcccggatggcacatctggtgtctttaacagatcaatttgattatctcggcgagcaagaaagtgaagaaggtatggcacttgcttttccagtaatggatcaagccgataatttggctaacaagttgccttggaccgttgttgacaaaggtgatactcgcgtaagtctaactttaattgatacgccggagagctataagagttttccatatcattttgaagtaatgactacttatgctttggagggtaatcaagtcaatatatccttttatttaaaaaattcttcaaataaggaactgccattttctttgggctttatcttaccaacttcttggcaaagtgaaagccaggtcaataagattagtttgactggcaaagaacatggcattgatcttacttcaactgattttaagttgagtgcaaaagaaggaagcgttacagcttttacggataaaattgaattagaggcaaaaagtagccgtaattttgcgttaagcttgactttgaagtaaaaattagtaacgattttaataagatatactaagcaagtcagcgatgatttgctttttttgttataatacattcaatgtgaatttacatcataataggtatattttatgaaagatagaaaacaaagatctaatcacccgcataatagtcgggtagacacacacagttataaaaatcgtcatatttgggtctgggttattagtatcgtagccttgcttgcggttgctggagcggcgtactttgcatcagtttatttccgtactaagtcagcggttgataagacctatgatcctaagactgcagtgaaaactacaggtgaatttgatggaaagaagaagttcgctgttttactgatggggactgatacaggtgcccttgatcgaactgaaaagcgcggccggactgataccatgattttagctgtagttaaccctgctaagaagcgttacacattggtctcaataccgcgtgatacgatggcacagatggttggaagcgagagcttcaagacagaaaagattaacgccgcttatgaattaggcggggctaggatgtcaatggattcagtttctaagttaatcaatgtgccaatcaagtattatgccgtggttaacatgggtggaattaatattagaccaacgcttagctttgaatatggcggttatatttttaaaaagggcaagctgacccatatgggtggtgcaggtgcgctagcatattctagaatgcgttatgatgatccacgtggagattatggtcgtcaagaacgacaacgacaggtaattaccactttgatcaagaaggcagtttcaattagttcattatcaaatctggattcaattttgacttctgtgtcaagcaatgttcggactaacttgccatttagtgcgatgcaacagattgcgatgaattatcgtagttgtgccaattcgtcatctagtgattatctacatggttacaatgcaatgatcgacgatgcggcttatcaagtacagccaactagtgaattgcaacggatttctaacctggtgcgcaaagaattaggtttacctaaggaaatgatttcaaataatgaaactttccaaaacgaaaagaatattgcaaatggctttagctttaagagcgaaaaaacgcagcactatcatatctatgattacaccgaagaaggtgataattaatggcgcgcatttgggctactctgattggctacgtttttggaaatttcttaacggcgatgatcgttggcaaaatctttttaaaaataaatcctactgaatacggttcacataatccaggaacggctaacatgggtgctgtttttggtaaaaaatggggtattttaacctgtttaggcgatttgcttaaaagtttaattgccttgtttattgtatattttgcttttccagctcatattaatattgcttatacagggctaggcctgatcttaggacattgttttccaatctgggatcattttcgaggtggcaaaggagttgcggttgcagctcaggtagcagttttttataattggaaagctggctttgctactttattagtggctttggtattaacagcaattatgcaaaatttgacgattccgcctttagtgtttatgcttttattcagtataaatacattcttgcataatcaagaagcaggatttgtttttatcgtgattactttgatcatgtgctttaagttctggcatgatatcgtagactttttcaccggtcatggcaaaaaggttgatattctgctttcaattaaaaagaagctagggatcattaagtaatgacagaaatttttagtgaggacacagactagagaaaatgagtgagattaacaagaaaaaatcactaaatgctcttcaaatcatttgtttgattgtcgcagcattctttatgctagtgcagatgtattcttggggtagcaattttggtagattaccattaagtaccctaatgagatttattccaggactacttggtcacagtacgatggtactagtaccaatggtctttggtgctgtttatagcaaaagaaaagttcatccaactgaagcctttaagttttggattatagcggttgttacactagtgcttttatacttggtgaacttctttaaacgaccaggtacctttaatatgtggaagctctggggagtatttttcccagttttgactagtacatcagtattgttggctggcttgatttttagtatgctagttcaaccatacttgtatgaattacaacatcgcattactactaagcaaaatgtattattgcttagcgcattaactttgactggttttgcgactagtgcaggtacaatgatctttaacaagtcaatttatggcatttatttgatcttgtactttgcttgggggatgtttttagctaacgttaaaattcctaaaaaggtctttggctggtcaattgcagctggagtaatgtctttcttcgtaatgtttatcggtattcccggatttaatggggtttactggtaccaacgattatctggtcgaagtggcgtttattcctggaatcctaaatttttaagtaatattgcttcaccatttttgttcttaatggttttagcagccttcttaatctttagaaaagtgattgttagctatagtgctaagcagatgcacttctttattccagtaattatttttatggacgctccaattattggtggttttgttaaatcgttccgctttaccaatagcgctggatttaacaagttcttgatgattgtcatcatgatgctagctgcctggggcttaagctggctatatgagcgctatttattcaaggtgaagccggttaaacggacggttgcttttttcaagcaacataataacttagcagaaattgttgaagatgcttggactaacttcactgcttggatagttgaaaatcgagtacgactacttacatggggctggttctatgtattaagttttgcttcattcttaattgaatcagataatctgcggatccaaattacgactgcaactgatatcaatgccgtaattttcttgctcgggactagattcttcgctattattttgacagcaatcttccttgatgcaatgtttgcaattttctacttcattactacgcgttactggacttcaacagttttagtaactgtaattacaattggttgggctattgccaacaagattaaattagatcttcgtggggaaccaatttatccaactgaattagacgaaattgttaactggaagaccttgatgccaatggtcggccaacaaaagataattatgatcgctattgccttagtaattatcattgcattgactgtctttcttgcaattaagtttccaattaagaaaaagggctcatggaaacgccgtggtatttgggcattgttgagtttgcttttgttcatgacaccagtgcgctttaaccacgatggcggaattatttatcacattaaccgtggctttgataataagcaatcgtttagaaaccctgaacgtgatattcaaattaacggtccattattgaacttcttgaattactttgacctgcagattatgaataagccaactaactattcaaaatctacaattcaacatttgaatgagaagtacagcaagatcgctaatgaaattaacaaaacaagaaagaatactctaaagaatcaaactattgtttacaacttgagtgaaagttttgttgatccatatactttcccaactgtaaagatcgatcctaaggtgccaaatccagttaaatttattcaatcaatggctaagagatctacttacggtagcatgcttagtgcaggttatggtggtggtactgccaacatggaatgggaaactttgaccggtttcaacatgggaatgttcaagtcaaccttgacgccatatgttcaaattgtgccaaaccatgatttctatccaacggtcggaatggacttcaattataagtctgcagttcacccattcattggtacttactactcaagagtagaagactataagagatttaagtttaataagtttgtttaccttggctctaaatataagatcattgatcaaaagaaacttggtaaatcaacttataattctgattacactacttatgcaaatggtttgaaacaaatcaatagcatgaagggtggtcaattcattaatttgatttcaattcagaaccacatgccttacaacaattggtatccaaacaatgaatacatgggcaaggtatctggtgaactcttcaacactgctgctattcgtgaacaaatggcaacttacatgaagggtgttcaatacactgataaggctgtaaagcaatttatcggtaagattgataagatcaagaagccaatcacagttgtcttctatggggaccactacccaagtatcttgtcacaaaactacgctagtcgttatccagtgcaaatgcactcaactcgctacttcatttattctaacaagtatgctagagaacatggtgctaagagcaagttgactcacaactctaattacgtcaacactagtgactttactgcaatgatgcttgaacaaactaattctaaggtaactccttaccaagcattgttaacagaagttcacaagaagttgccagcaatcacgattaacttcaatggtgatcaaggcttccaattagttgaccaaaaggggcacttcgttgatccaaagaaattgacttcagaacaacaagcaattttgaaggattacgaaatggtgcaatatgatatgactgctggtcaagcttatggcttaaaagctaagggcttttacaagatcggtgactaaataaaagagatcgaacgtaaagttcggtcttttttctacgtaaagtcaagcgcaataaggtgtttggctttattttttacctaaattttgtcatgagtatcttttagtggcgatttatttttttagaaagcatactaaataagcccacctctatatttaatttatgggcttagcgttataatgtacttgatcaattaattacaactaaagtctttttggttatgtgtggctacgttgtaatcatatagttgatcattgataatcagagcataaatggttctgattagtttatgaattgaagcaatagctatctttttgaaccctttggtttgagaggatagctttttgctttcataataatctgctatatgacacggatttgtcttagctgcattatcaatttgtccaatagctcgataaagcaacttacgtgcgactgcattgccatgtttagtaatacttaaattagagtccatttctcctgactgatatctgcctggatcaattccgataaaagcattgattttattaggattactaaatctgcgtaaatctcctaactctgctaaaactctgacagcagtggtctgtgcaaagcctggaatgctttctaggttttctaaatcatgattaggcaaagacttcgctaacttaaccattcttgcgattaaattttctctttgatcacttaaattaagcaatctgtgtgcataatactgcacttgctcgacttctatgctagagcaagatacaactggataagcttgataagctaattcaattaatttatctgcagtccttagagcgtgtttaaaagcaatcccctttaagctcattaaccagttaataagctgttttttatcttctcttcttactaagtcacaatgaggatatcgcacaactatttgccagtaatttttacctttagcagaagaaaatagattttcaatttcaggaaaagtcgattgtagagcttggtgaagtcgatttttagccattactaagtcagctgttaactggtcatagaagcggctcaaagcattaagctgcttataagtttgagattgaagttgattaattggatgatgatatagtctttgaattaaggctaaatgataagcatcagttttatcagtcttattatgacgtagtcccatatccatttcttttttagctttaagaggattaagaattacataatcatagccatagtcttccagaaaagattgcagtgtacgtgaataaacaccggtagcttcaaaaataatttgcggatgtttagaaaaagcggttaattcatgaagcaattgaataaaaccaggacgattattagtaatggttagttcatttttgctttcaccaattagttcacaaacagtagaagtagacttgcttacatcaattccaaaagtaacttgcataataaaaacctccaaaacttagtagtaaaacgtatttacttaagaaatcagatctaattttctaaactcgacatctagtgtccacattcttcgaagagactattgaaaacttaagtaaaactgccagttttgtatacgacatcaagtgtctaaagacctcagggcatatcgttttactactactttaattctacaaaagaataaaaatagtgaatcaattatcccgtcggataactaattcactatttagcttagaatgttttgtatccaatgataaaataagggctaagaggaataactgataattagctgatttaaaggtgattagaatgaaaaagataataacaatggcactagccagtgctgcactatttggatcttctgcaacaactgttcaagctgggacatataatcctaagaacattaccagttttaatattaataggcgtaactatgtagctaagggaaagatttataaactccatttacccgcagctggtagattagttactaatggcaatgttactttaaaaaatagtatggaatggacctgtattccttatggtaaggacaaaaatacgtattatctgcgtaaaggcacatattatttaactagttcaaagaatattagtgtgaagactacttatactcgtttaactaagatccgtaagaatttagaaacttacgttgaaacaaagaagaataatgacaacagtagtcttaaagctagaaagattgaaattggtcaagatattaaagcaatgggtgaaatgtacgattacgatagtgtcgactactacacatttactattgactcacctcaaatggttacgatgaggatgatcaataatccgatttatcagcttggaaaaggtaacattttcagcaagatgaatgtaatcatgttcagtgaaaataatccagttggcggtagtacgatgctttacccagagagtttcgaaattaatggcaataagattgctagtcaaagctggtacttgtctaaaggaaattatacttttagtgtaaatactcgtggactttataattttcaattaacggctgttcctgatacgcgtgtggtaccggcagatactgagatagaatctttacaaaacactaaggatggtatggttgctaacttaagggatgcacgtcatgcgaagacttatgaacttgcatggcgtgaaaaaggctcaaaggcagctccattcacttctagtagcaatactacagaagtaagtactgcacctgctacacgttacatagacaaaaatgatcgtaaaatcccagtttcaattggtaaaaaattagttaatggtcaaagctactattttgtagctcgcggtgtaagcaatcctgattacattcgttacggcaatccggaaaaagataattattttggtgcttggagtaattcagtagaacacacttactatgcaccttcagatgcaacaccaggtgcagttgatttaaccactgctaaagctgacagtacttatcacaacattcatgtggcttggaataaaattgctagtgcacaaagttatcgcattgcctaccgccaaaaaggtacaaataagtggtactatgaagtaactgatcaggctactaacgcgattactggtattactagaaatagaaattatgaagtgaaattgcaagcattgaatggtgaaaaaactggtccatggtccgcaattaaaacaatttttgtaaaatagcggttgactaaaactatttttctcgttaatatcataactaacaaatgagtagcgagtcggctcagcgttcagagaactagcggttggtgtgagctagacaggccgattttagcgaagtacttaatagggttgctcctttaccggcttgaataaggcgcagcagcgcaaacgtgggtggtaccacggctaataatgtaatttagtcgtcccttggtcttttgaccaggggacgttttttattggaggaaaaactatggcaaaatttgatattttggaagatttaaaatggcgtggtgccattaatcaagaaactgatgaggaaggtttgagaaagtacttagcagaacatgacgattgggcattgtactgtggtactgacccaactggtgattcccttcatattggacaccttattccattcatgatcttgaagagattccaaatggcgggctaccatccagtaattttaattggtggtgttactggtgcgattggtgacccatcaggccgtaagactgaacgtactttacaaactgcggaacaagttaagcacaatgaagaaagcttaactaatcaaatgaagaagttatttggtactgaaaattttgaaattagaaacaatgctgaatggctaagcaagcttaacttgatcgacttcttgcgtgattatggcaagttattccaagttaacaatatgattaacaaggatgttgtagctagccgtcttgaaaatggtatttcatttactgaatttacttatcaaattttgcaagcaattgatttctaccacttgaataaagatgatggtgttcaacttcaaattggtggtagtgatcaatggggtaacattactgctggtattgatttaatccataagcttgaaggcgcagatcgtccagcctttggtttaactattccattgatgcttaaggctgatggtactaagtttggtaaatctgctggtggtgctgtttggcttgatccagaaaagactagtccttatgaattttaccaattctggattaatcaagatgaccgtgatgtggttaaatacttgaagtacttcactttccttagccgtgaagaaatcgaagatttagctgaaaagactgagaaagaaccttggaaacgtgctgcacaaaagaagctggctgaagaagttaccaagtttgttcatggcgaagcaggtcttgaagaagctaaaatgattactgatgccttgttctcgggcaatatcaagaacttatcagttgctcaaattgaacaaggcttgaagaatgctccaagtgcggaagctggcaatgaaaagaagaatattgttgatttcttagttgacactaagattgaaccttctaaacgtcaagctcgtgaagatgtaaagaatggtgccatttatgttaatggcgatcgtgagcaaagtactgatttcgaagttgatccatcaagtgactttgatggtaagtacgttattattcgtaaaggaaagagaaagtatactttagttacaattaaataattaaatatatgattttaacattttatatataaaaatagagggattttttcctctatttttttagctaataatcggagatatttactaccaactaatatttgtaaaagataaagataatgatttgtgtaaaataatattttacttcttaaattgttattttattttctaaaatcaattgctacaatctatttattaagttattcacaaattcacattattactatacaatttgttatttcaagtgtaataccaatataaaatagctgcgtataccttttgcaaatgctgatgcaaagcactctattaaaaactgactcttaataaaaatatgtgaaaagcagcactatctgctttacttctaatcaaacagtgttatagtaatagtgtaaagagaaagtaagtaaatagaaagaggttattaaaatgttagaatctaagaaagctattaagattatttcaagtttggtaatcggtttgagtttaggctgtgttcttactcctattgctcaagctacttcatttactgctcctaaattgggtactgcaacacaagctccaaccaatcctgctattaaaaagggtgataagatctttgttgttattaaagacaccaaaaatcaaaaagtagctgtttacaataaaaatgctgaaaaaactagcaaaaaagttgcaatgggttctacttataccgcaaaagacgttaagaaggttaataaaaagaagattgttagaatcaacaagagtcaatggttgaatactaaagacgtcgttaagaactaaataaaagcaaatttaataaccgttttgaatacttattttctaaaaatacttggagagaataaataaggacgaggatgttcaaatgaatgtcttcgccttttttggtataatgaagacgccgctttagctcaataggtagagcaccgccgtggtaaggaggaggtccccagttcaaacctgggaagcggcttagttgttgtttttggcaagaaaggaaaaattttatgaagcatgaacttacaatgaatgaaattgctaaatttcaaaaagaatatgagcaaaaaccacaaaatcgggttgcggaattggctgttgttaataatggtgtggctaaggctagtttggattcagaaaaggttaggaaattgaaccgcactttttcaattgaaatcccaactgataatgttactgatcaaaagcaatcgggtcgctgctggctatttgcggccttgaatacattgcgtcatggttttgctaagaagtataatgctaaaaactttactttttcacaaaattatttattcttctgggatcgaattgaacgagcaaatattttctttgataatattttgaataccgcagatcgtccacttagtgacagaacagtgcatacttatatgcagggacctgatactgatggtggccaatgggctatggctgtttctttgattaggaagtacggcttagtgccaacctatgctcaagatgaaagtttcactgccaacaatactgctttcttcaatcgtattttgaataataagttgcgagaagatggacttgtgttgcgtaagttagctcaagcaggtaaaaatgatgaaattgaagctaaacgtcaagaatttttgagtgaggtttaccgtatggcagtaattgctttcggtcaaccagtacaaaaatttgaccttgagtttaaggatgatgaaggtaagtatcattttgatggtgatcttactccacttgatttctttcacgactactttactgatgacttggatgactatattgttttgttcaatgcaccagatcatgaatttgataagctgtatgctttgccatttgaagacaatgtagagggcggaagtccagttcatttcttaaacactaaaattgaaaatcttaaagaagctgcgattaagcaacttgaagcaggcgaaactttttggtttggttgtgatgtaggtaaagatagcgatcgtcaaaagggaattttagctcataacctctatcaaactgatgctatttttaatattgaaactaagttaagcaaaaaagagagactggaaactggtgcttcgggttcaactcatgccatgacgatggttggtgtggatgttgttaatggaaagccacgtcaatggaaaattaaaaactcatggggaaacaaggtcggtgaaaaaggctactttgtgatggatgataactggtttgatgaatatctcttcaaagtagttgttaaaaaacaatatgtaccggaaaaactggttaagatttgggaaggcaaagcaacgccggtaaaagcatgggactcaatggcataatggaaattaaacaagttatcgattttactcaaacacacttaaagaatgaaaaaacgggtcatgatttttatcatggcgaacgtgtagctaatttggctagtcaaatgtatttagcagatcatgctgatgctcatgaagatagccgggtagttgctattattaaaacagcgggttatttgcatgacacgattgatgaaaaaatatgtgctgacccacaaaaggtaattgatgaaattaaagttttattgccgcaagtagggtttaatgaactggaggcatgggatattttattcaccattcaacacatgtcattttcagctaatattgagcatcactatcatttgcctttatctggacaatatgtgcaagatgctgatcgtctagaaagtttgggtgcgattggaattgcccgtgcctttacgtatggtggtaaacatggcaataagatttacgatccagagattaagccagccgttttaactagtcatgatcaatatcgtaaccatgtcgaaaccacaatcaaccacttttatgagaaactttttcatttagaagatttaatgaatactcctgctgccaaaaaagaagcggaaagacgaactgcatacatgcgcgactttgtacgtgaatttatgcaagaatggaatgtttagaataatttaattttgaataagccttgatacatcagcattgaggcttattttttaaataaattaaaaataatattaaaaaaaacttgcaaagcaaaaaatatttagctatacttataaacaacttaaagagttctattaattttctcataaacgaggggagcaataatatgaagtttaccaagttattcgctgcaggagcaaccgttttgattgctggctcaacattagcagcatgtggtagtaattctaattcgtcaagttcatcagctaagaaaacaattaattggatggattcggctgaaattccaacgatggacatttctaaggcaacagacgttaccagttttaaccaattgggtaacgttgaagaaggtttataccgtttaggtaagaattctaaagttgagaatgctttggcaacagataccaaggtgtcaaaagatggtaagacctggactttcaccttgcgtgattctaagtggtctaatggtgataagttaacggctaaagactttgtttactcatggcgcagaaccgttaatccaaagacggcttcacaatatgcttacctcttcgaaggaattcataatgccactcagatttctgcaggtaaggcaccagttaatagtttgggagtaaaggctgaaggtgataataagttagttgttaccttagacaaacgaattccatactttaaattattgatgggattcccattgttcttcccacaaaaccaaaaggtggttgaagctaatggctctaagtatggtacttcatctaagactacagccttcaacggaccttttgtacaaaagggctggactggttctaacctttcttggaagcttgtgaaaaacaagaattactgggacaagaagaatgttaagcttgatgctattaattacagcgtgcaaaagacaccatcaacagcttacaacttgtaccaatcaaataagcttgatgctactattttagattcacaacaaactaagaacttaaaacatcaaaagggttacactttgcgtgatactgcagcaaccttctatttgcaatttaaccaaaagaagaagattttccaaaatgctgacttgcgtagagcaatctcaatgtcaatcaatagaaaggcactgggaagtgctttaggtggtgctaataccccagcaaccagtttaacttcaaagggtgtagttaaccatgatggtaaggactggtcagaagttgttggtgataagaagaacgccgcatataacccaactgaagctaagaaactttacaagaaggctttgaaggaattaggcgttaagaacgtttcatttacaatcctgtctgatgatactgattcaggtcaaaagacgactgaaacacttcaaagtcaattagaagaaaacttgaagggtatgaaggtttcagtagctaacgtaccattcaagactcgtttgaaccgttcaactagtggtaacttcgatgttgttgtttcaggttggtcagctgactttgccgatccaatttcattcgttgacttgtttactagcaagaatgcacaaaataacggtaagtggagtaactcccaatacgacaagttgatcgctgattctaagactacagcagatacaactaagcgttgggatgaccttgaaaaagcagaaaagatcttgcttagcgatgaaggaatcgccccactttactacaagactgaagcttggttagttcgtccagacattaagggcattgtctacaatggcgctggcttaaactacaacttcaagaatacttatgtagcaaattaattaaaaaatcaggaggacatagtaatgattattatttcagcaattattattttacaaacaagacataaaaataatctctcttcacttgtaattgcgtaataatagtctagctatgatttgatgaatagatagaaggagcaaccatgtgaaggttgctcctttttgtaataaaaaagaatgagggtcaaaatgaaaaagtggaaaaagtattttagtgcaagtttattaaccgtcgtatcagctgcaactttggcagcctgttcaaataaaagttcgtcatctggtaccaagcaaaccttgaattggatgactaaatcagaattacaaactttagatttgtccaaggtgactgatgcaactagtttagatcaaattaataattcgatggaaggactctatcgtttaggtaaaaattccaaggtggaaaatgctttggcaactaagactgaggtatcaaaggatggtaaagtgtggcattttactttgagaaagaatgccaaatggtctaatggtgatccagttactgctaaagatttcgtctattcatggcgtaggactgttgatccaaagactgcctcacaatatgcttatcttttctcaggagtaaagaatgcggatgatgtagtagcaggaaagaagaaggttgaaacactcggtgttaaagcagatgataaccaacatttaaccgttactttggatagaagaattccatactttaagctattgatgggcttcggggttttcttccctcaaaatgaacatgccgttgaaaagtatggcaaaaattatggtacctcatctaaaacaatggtttataacggaccatttgtatcaaaaggctggaccggttcaaacttgtcttggaagctagttaaaaataaagattactgggacaaaggcaaggtaaaactaagtaagattaattacagcgtgcaaaagacaccatcaactgactataacttgtatcaatctggaaaattagatgtagcattattggcaccacaagctacaaaacaattgaagaaccagagtggttatacaattagaccagcttcttcaacacaatatttacaattaaacgaaaagaacaagcttttccaaaatactgacttccgccgtgcactttcattatcggttaatcgtaaggcattagcttcagctgtaggtggtgctaacaagccagtcactaccttttcaccaaatagtatgactgaagtaaatggcaaagattatactgaattagtcaaaactgctgaaactgataagttaatgacatataaccctactttagctaaaagttattggaagaaagcacaaaaggctttaggacagagcaaagttaacttcactttgctaacctatgacgatgatgatgccaaaaaagcaggtgaatacttgcaaagtactattgagtcaaacttgaaaggcgttaatgtcagagtaaatagtttacctaaaaagactgccttagttcgtggtcaaaatggtaactttgatgctttactgatgggttggcaagctgactttactgatccaatctcattccttgacttgaacacctcaaatgcttcatacaactggggcaagtgggctaataaggaatatgataagtatgtagcagcttctaaaactactggaaacgaaaatactcgttttgaagacttagctaaggctgaacgtgtattgttaactgagcaaggtgtagtaccactttaccagccagcagaagcttggatggttcgtccaactgtcaagggcgttgtatataatggtgctggagctaactataacttcaaatatgcttatgttgaaaagtagactaaaatcctaaatatctaaataatagaacttataacaataaacaactcctctatgtaattaaaaagcagaccgaaaaaatcggtctgctttttgattttcgcttgaaaaaagcaagttaggctagtaaagtaaaactaataattttttgaatgagaaaaggagagcttaaatgtcaaattgggatacaaaattcgctaaaaaaggtttaacgtttgatgatgttttattaattccagcagaaagtcatgttttgccaaacgaagttgatttgagtacgactttggcggataacattaaattaaatattccattgatcagtgcagggatggatactgtaactgaaggtgcaatggcaattgcaatggctctccaaggtgggctaggcgttgtgcacaagaatatgtcaattcaagcgcaagctggtgaagtagccaacgtaaagagcgtagttgtgccaactagtgctgcaaaggccgcaactgatgatcaaaaccatctgctctgtgctgcagcagttggtgtaaccagtgatacttttgaaagagcagaagcattgcttgaagctggtgctgatgcgatcgttatcgatactgctcatggtcactcagctggggtattgcgcaagatcaaagaaatccgcgatcattttccagaagcaactttgattgctggtaatgttgcgactggggatgcaactagagcactgtttgatgctggtgttgatgtcgtcaaagttggtattggccctggatcaatttgtactactagagttgttgctggtgttggtgtgccacaaatcacggctatttatgatgctgctacagctgcacgtgaatatcacaagccaatcattgcagatggtggaattaaatattcaggtgatgttgttaaagctttagcagcgggtggcaatgctgtcatgcttggctcaatgctatcaggtactactgaagcacctggcgaaatttttgaagataatggcaagaagtataagcgctatcgcggaatggggtctgttggtgcgatggcccaagcacacggttcaagtgaccgttacttccaaggtggcgtaaacgaagctaataaacttgttccagaaggtgttgaagctcgagtagaatataagggcgatgtttctgatgtagtctttcaaattgatggtggtctccgttcaggtatgggatattgtggtgctgcaaatattccggaattaattgataaagctcaatttgttcaaatcactaatgcaggtttacgtgaatcacatccacatgatgttcaaatgaccaaagctgctccaaactataagtaaagcaaaatagatataataaaagttaaaaataagagagaaagcaaaatttctctcttatttttttaattttttggacattttcactagatatatttatttcttttggtataattaaaacagcattaaaaagtaaatgaaagcataaaataaaatgagggagcaattaatatggctagatacctattaaaacgtatattttatatgatcctcactttgcttatcgtggctacggtaacttttttcttaatgaaattgatgccgggttcaccttatgctaatgaagcaaagatgacgctaactcagcggcaaattatggatcaacagtatggtttaaataaacctatctggcaacaatatttgatttatattgcggggatgcttcacggtgattttgggacatccttccaatatagtaaccaaccggtagcttcattaattggggcgcgtttgggtgcgtcagtacaattaggtttacaagcattaattttgggagttgtccttggtgtaatcgctggggcaattgctgctatgagacagggtacttgggttgactcaactgctactgtaatttctattttgggtaaatcagttcctaactttgttttagcagttttgcttcaatactacatcggtttaaagctaggttggttcccaattgctggttgggggcaattttctcaaacgattatgccaacgattgctttggcagttggaccatttgcggaaacagctcggtttatccgaaccagtatggttgataccttaagtagtgactatattgagttaggtaaggccaagggcttaagtagaatggaagtcattagaaaacatgcaatgcgtaattcaatgattccattagtaactctgattggtccttatgctgtagccttgatgactggttcaatggttattgaaaatatctttaacgttcctgggattggtgaacaatttgttaagtcgattttgactaacgactatccaacaatcatgggaattacgatggtttactgtattggattagtagtaattctgttgattactgatattgtttatggattaattgatccaagaattagattagatgaaagcgaggcctagaagacaatatgactgaagaaaaattaaaccttactgcagatgcctttgaacccttaccaaaagatgaagcacaggataacgaaaacattgcaggtccatctttatcgtttgcacaaaatgtttggcttcgcttcaagcagagaaaagcagctattatttctgcaattattgttattttgatgattgtagtagcttttggttcaaccccattcatcaataaatctactttagttaaatcgcacccacaatatgccaatttgcctgctaaagtgccaggaatgagcgcaattaacgggttgaacggtaagattaagcaaaatggcaagtgggttgatgcttatgcccagaatggcgtgcctaaagataagtattttatcgcaggtacagattatttaggcagatctttgggacaaagaattatctatggtacaaagatttcattgatcgtcgctttagttgcagctttctttgatttaactatcggagtcgcgtacggaatagtgtccggatggaaaggcgggggagtcgataacgtgatgcagcggataatcgaaattattttctccgtacccaatttgatcattgtagttttgatgttggtggtattaaaaccaggtattaagtcaattatcttggcaattgctatttcaagttggacgacaatggcgcggcaggtccgggctgaaacgttgagtttgaagaatgaagaatatgttttggcagctagatcattaggtgaatcaccttggaaaattgcttggaaacacttagtgcctaacctttcaagtatcatcattattcaaacgatgtatactattccaactgctatcttcttcgaagccttcttaagtttcatcggaatcggtatttcagccccagaaacttcactaggtgtacttttgaacgaaggacaaaagaattttcaattcttgccatatcagatgtggtatccagcaatcgtattgtgtgtgttgatgattgcctttaacttattaggtgatggtttgcgtgatgccttcgatccacggggacaaagatagaaaggattaacctaaatgccagaagaaagagttttagatgttaaaaatttaaaaattgatttccacacttatgctggtgaggttaaagctattcgtaacgtttcctttcacctaaataagggagagacgctcgcaattgtaggagaatcaggttcaggtaagtcggttactaccagaagtattatcggtctgttagcacgaaatgctcagattgaagacggtgagattgatttccacggcaaaaatttgctagagttatctgaaaaagaaatgcaaaaaattcgtggtaacgaaatttcgatgattttccaggatccaatgacttcgcttgacccaactatgaagattgggcagcaaattgcggagccattaatcaaacataagggtgcctctaagaaagaagcttgggctaaagccttggaaatgatgaaggccgtgggaatcccaaatgcagaagaacgaattaatcaatatcctcaccagttttcaggtgggatgagacaaagaatcgtaattgcgattgctttaatttgtgagccagagattttgctggctgatgaaccaactacagctctagacgtgactgtccaagctgaaatcttggacttgatgaaagacttgcaaaagcgggttaagacctcaattattttcattacgcacgacttgggcgtggtggccggtatggcagatagagtagctgtaatgtacgctggtgaattcttagaattcggtggtgttgatgaaattttttatgatccacagcatccatatacttggggcttaatcaattcaatgcctactttaaacagtgatactttggagtcgattccaggtacgcctcctaacttgcttgatccgcccaagggtgatccttttgcaccaagaaataagtatgccatgaagattgatgtggaaagaaagccaccatttttcaaggtaactgatactcactatgctgcaacctggcttttagcaccaggtgcacctaaagtggaaccaccagctgaaattacacgtcgctggaaaaaatataacttgatgaaacaagaagataaactgccagaggttaactagtcgcggtaaaggagatttttatgccagaaaaaaagaaaattttggaagtaaaacatctaaaacaatactttaaaaatggtcgtaatgtcaccaaggctgttgacgatgtaagctttaatatctatgaaggtgaaactttcggcttggtaggtgaatctggttctggtaagacaactactgggcgctcaattttgcaattgtataagccaactagtggcgaagtgatttttgaaggcaaaaatgtagcagatttaaaaagtcgtgcagacaaactagcttttacacgggatgcacaaatgatctttcaagatccttatgcttcacttaatcctagaatgactgttgaggacattattgctgaaggattagatattcaccatttggttaaaaataaagatgaacgaactgagagagtagaggaattattggaaactgttggcttaaatgcaagtcatgctagccgttttccacatgaattctcaggtggtcagcgtcaaagaatcgggattgctcgcgccttagccgtagagcccaaatttattgttgcagacgaacctatttcagctctagacgtatcaattcaagctcaagtagttaacttgatgattgaattacagaaaaagcgtggtttaacttacttgttcattgcccacgatttatcaatggttaagtttatttctgaccgaattggtgtaatgcactacggtaaactactggaagtaggtccagccgatgacgtctatgatcgaccacttcatgattacacgaagagtttgatttctgcagtgccaattcctgatccagaagttgagcggagccggacaaggattccttatgacgctcaaaaagaagaaatggacggaaagcaacgctcaatgcatgaaattcgtccaggacacttcgtacgctgctctgacgatgaagtcaagcattacgaagaagtagcggcaagctacgaaaattagataccaaatctaatgcaactctctctatattaatattatatttatgctaaaaaggcgatccgatatggatcgcctttttatatgatcattgctcgttaagctaatgaatcccatgctggtaggtcagtgattggaccttcagcgagcttcttttggttttcagttaagtacttcttgtggactacaacttcgtaaacatagtccttaaaccattcattattcatgacgtagaagcctttaacaccagatttatcgccccatgagttctcaactttccattgacgaacttcgccgttgtcttcatcaacaccaactaaagtcatggcatgtgacacttgaccgacgccggtctttaatctgtctgctttagacattttaaggtcaacgccgaataagtcatctaacttgtacaaattagtgtcaaggtaaccagttttacggtccatttgacgtaaaacatcgttaccaaaccaaacagcttcgccgtcttttaattgagcgatagcagcgctggacaagtattccattggtacattcaaaatcttgattctcagtgagccttcaatgttgtcttcagctggtagaccataaagcttgttatagtcatggtctggagcattggttaaaacaacatagtcatcaaaatcaacgtcgcccatgtacttgtgtaaaaactcaagtggagttaggttcttttctaaatgatatttcttgtcgtcatcacgatattcaagatcgaaagtcttaggtggttcacctactgcgatagcagtcatttggtaaacttcgcttaaaaatttttcgcgaacctttttaatttcatcatctttgccgtattgcttcaagtggcgcaatactaaagcatccttctttaacttatcgcctaaagcagtcgcaaaaccagtagtatcattggtgttaaaagtttctggcattgcatatgaaggaacaacaccatatttttcaactaaagcggcagccatttggaattgtccaccatcactaccagcaaagtctaagtcagccttaacttgacgtgaatcaagtggcatgtcagcactgtctaagattctgttgtagaacatgttagcacgttcgatcttatcccagaagaagttgtaagcttgtgagaaggtgaagtccttagccttatatttcttaccaaaagcgtggcgcaaaacgttcaaagtcgcaaacagccagcaacgaccagaatgtttttggttagtgacattatttgtatcaagttcagttgaaaagacgcgggttaattgtccttgaacacgatcattataagatgcttcaagtacaccactgcgttgagctgcacgagcaacgactttattttcaggttttttattaaattcggcagagaacttttctagttcctgcacagttaattcatgagccataaaaaatctccttttcattttataatttttttctcaatttaattctattttaaagcaaaacaaaagcgggttcaatcagaactcgcttgagagaattattaatccgtcaacttattagatttcttgcctatatctaataaattaatcaatttggatagaattgccatcattgccagcagtttcctttggcaaagtgatggtcaatacaccattatcatactttgcatgaatctcacttgcaactacatttggtaatctatagcttctagaaatactgccctcacttctttccttatgaatgatatttctatttttatcgctagtgtccttaaatgattttcttgtgccgctgacatttaacgtaccgtcattatagttaacgttgatatcctgcttatccatgccaggcatgtcaatcttaactagatagtccttatcagtttctgcaacatcagattgcataatgttttcaatttcattatcgtcaaagaagtttcttggaaaaccaaaccaatcattcattgtatccatcatgtcgttgcgccgattcatcatattgtttgccataaataaaacttcctttcatttttgtatttgcttaattagaatataaggaaaagatcaactcatttcttgatctcttttctccttacactgtttattgtagtcgctttttatagaaatgacacaaattagcactcaaaaatatatagtgctaattttagactgataacgctgctacaataacattctgagattgtagataattattacgtatagaaaaataaagaaagtttgtgaaatagaaatggtatattttcagaaaatgactccagaaggctatcaacaaattgaggatgaaattgctcgattaaaaaaagatcggccacgtagaattaaaattttgcaggctgcacgagctttaggtgatctttcggaaaatactgaatatactgaagcaaaacgtgatctaggtcacttacaaagtcgtctgcgttacctaggcaaacaattaaagtatgccgaaattgttaaagctgaagatgatggtaaggttgatctaggaaagaccgttgtgcttaagtttgatgacgatgatgaaacagaagaatacaaagtagttgggcgaatggaagcggatcttgctgctggcaaggtttcttttgattctccattgggtcaagcaatcatgaaaaaggaggctggtacaacagcaacggtggctgcaccagcaggtgaatatcaagtaacgattgtggaagttaaataagttgagaactataataaactgtctttttctggtataatatgggttttgtaggatacaattcagagtaggagtgaagaatttgaatacgccacaatcaagagagggtaatgtgatccgctatgccgtttatttagctggctatgtcgctgtgtttgcagtagtaaagctagttactagaaaatctccggttcatatttgggatttgattttattcggcttagttgcagccatgattctgttgttttatgtttatcgtttcaatcgagagcaacgcttttttgcccgtgattttaaacttccatggttgggcagtttgtcaactgttgttctattaacattagtgattacagttacacagatttcgatttcatacttacaatcatatggcaggattagtcattatgatttccaattgatatatgccaaaagtgaatcagttaacatgttttggtttttaatcgttgtccaaggaattgtattaccaatcctacaagaatttttggcgactggctttttgttcaattatgcttttcggcgaaatactaagcaagttgcaattatggggatcattgtttcaggtctgatttatagcttactgaactttcaaaattcagtagtactctttattattgatgcaatttatggcatggtgtttgcttggagctatatgtacacacaaacattattgatgccaatttacttagctgtagttagtggcgtacttacagtgattatgatttaaaaacaaaaggatgagaaaaattctcatcctttttttatacaaaaagcggatagcgtgaatcgaacccgcatctacagcttgggaagctgtcgttctaccatttaactatacccgcaatatgtttttattttagcattttttctatttgaagatcaacacttttacgatcaattaagctggtaaaattttgaaaaagccagcggcgtagttcgttgggcataacaactagaggcattctattatggattggcgccatatctttgttaggcgcggtagtaaccattgaaaaataatcctgatcataaatacctgcaattaaggtaagtggttgattagtgcggaaggcgtagctatcatggtatttacgaccgttttcagcaatatgggtagttttagcatattcaaagaatttttcggttaagattaagcaacgttgcttggcaaaggatttgtcccacattgaaggcgctgaatcataaaatcgctcaattctagcgttaaataatggcttttttggatcaacgggacttggatagccccattttttgttgtttaattgcaattgaccattttgataaagcaaaacaggtgctacttggttaggaaaaatatcttgtgcttgaatgtcaaaatttggtgtaactaagggcaggtcaagatcgcttttgagatattgttgaatttgttttaaattaggtaaacgaaactggttgcacatacgcatttcctttctttagggctagtttaatcatagcctattttttgttaaaattaggtaattaaacaattaatattaataaaaaaataaacttaaaaattagaaaagagcaaaaagatggcgaaagaaattttattaactggtgaccgtcctactggtaagctgcacattggtcactatatcggttcattaaagaatagagtaaaattacaaaattcaggtaaatatgatccatatattatgattgcggatacacaggctttgaccgacaatgctcgtaatccggaaaaaattcgcaatagtttgatccaagtagctttagattacttagctgttggtattgatccagctaaatcaactatttatgttcaatcacaaattcctgctctatttgaattgactgcttactacatggatttagtaactgtggctcggcttgaaagaaatccaactgttaagacagaaattaagcaaaaagatttcaaagactctattccaattggctttttaaactatccagtttctcaagctgctgatatcaccgcttttaaagcaaccgttattcctgttggagatgaccaggaaccaatgttggaacaaacacgtgaaatcgttaggacttttaaccgtgtttataattgtgatgttttggttgaacctaaaggttatttcccacctaaaggtcaaggacgtttgccaggacttgatggtaatgcgaagatgtcgaagtcacttggcaatgcgatttatcttgctgatgatgcaaagacagttcaaaagaaagttatgtcaatgtacacggatcctaaccatattcacgttgaagaccctggtaaggttgaaggtaacactgtctttacatatcttgatgtcttcgatccagataaggacaaggtggcagaacttaaggcagaataccaaaagggtggcttaggtgacgttaagattaagcgttacttaaacaaggtccttgaagcagagcttgcaccaattcgtgaacgtcgcgaaaagtttgctcaagatgaagatgcggtttatgaaatgcttctggaaggttcaaaaaaggctaataaagtggctaatgcaacacttgaacaagtccgtgacgcaattggtttgaactatttcaagaatagataaggctgaggtaaagttatgcacgatcgaattccttggaaacaatattttatgatgcaggcgctagtaattgcgcaacgctctacttgtaatcgcgcattagttggtagcgtcttagtaaaaaataatcggattattggcactggttataatggttccgtttcaggacaaccgcattgtgacgatgtgggtcatcaaatggttgatggtcactgcgttagaactattcattcagaaatgaatgcgatcattcagtgtgctaagtttggtgtttctacagaaaatactgagatttatgtgacacattttccttgctataattgctgcagatccttgttgcaggcaggcgtgaaaaaaattaactattattttgactatcgcgataatccattggcgatgcaactacttcatgatagcggggtgccttatgaacagattaagattaatcgcaaatacgtggaaagcttggcccataaacttgaagaagacgagaattaatttaatttggttaatgggactagtaactgtatttttaataacgacaggatttgtccagccaaatattgaagatcatgctcatattttagataaagaaactcgcactttgattacggaaaaaaataatcgctattttcagactaaagaacaaccgcaaattgtcgttataacggttaaaaggctgaataagttaacacctaagatgctagatcattctaagcgaacggtctttattgtggtaggacagaaaggtaaaaagcgtaatgtgcaaatttattcaactaaagatttgcatagtgccttcaccgaggtcgctcggggcaatatcttgcgtgctgaagtagataaattgcgtagtcaaaataatgcaacttttaacaagggaattcgcttcgtctttcgggcatgtgcgactagagttgatcaacaatatcaatatgcacttgataaatatgatttgacgcaagcagaacaaaataaagtcgcgcgtccacatagtgtagctttaccaatcgcactggcactggcatttttaattacgggaattacttatttcttgcgtagatttagtcatcgtgatccaatttctaagaaatagtcggcttgacttatttgcattttgtccttacactttttatagacataattagcgaaaaactgttaggtgagactcctacgtgaacacacgctatcgcccagaaacatccagagatgccaacgggttaaataggtgtcgtcgacttaaggcgagatccagatagctagcatgtgcttacgtcacgtagtgttaaaactgaacgacgagtatgacagagccttgtttggcaaaagtcacctgcagagttacaggtggcttttttgttttgcttgtcccaattaaagaagggagcaaataatgttaaaagcagctagcaagaagcgatcgaatatagacattcaaaggattcaacggattgcgcgtgagtcacgtagcgagacgctggcgcgtttacaggcgagtgctgaagggctttcgactaataaggctgaagaaaacagaagagaatatggcaaaaacgaaatcattactaatagcaattcctctaaatggcgcttattatgggaatcaatcgctacgccatttacgttggttttattagtattaactttattaaccctgtttactagctatattttggtgccacaaggagataatgacttaattactacgatagtgatgatcgtgatgttgattatctcggttctcgtcaattttatccaaaaaatcagaattgctaaggtaactgatcaattactcaatatggtatcagttacaacgaatatccggcgtgatggcaaaaatgtggaattgccaacagatgaagtagtggttggtgatgtaattaacttgtcggctggtgatatgattccagcggatatgaagttgttaactagcaaagatcttttttgctcatcaagctatttagatggggatcctgagccggcagaaaagatggctaatgtagtaattaagccgagtatggctaatgattatttgaactaccctaatattctatatgagggaacaactattgtttcaggctctggcaccgggattgtttttgcaattggcaatcacactgtttttggcaaagcagttcaggctatttcccgtaaaaaagtaaaaactaccctgtttgaccgggaaatgaagcaattagctaaaatattgattatcgcgacagcaattgtgattccgcttttgtttgtgattaatggcctgactaaggggaattggggggggaaagcttaattttcgctttgacagcggcagttggcttaacaccagaagtgttgccgattattgttaattccaatttaacacggggcgcacgggaaatatcccaaaatggtgctgtcgttaagcaaatgaatgctattcaaaatttgggctcaactgatgtgttctgtatcgataaaaccgggactttgacacaaaatcaagtggttttagagcgtcactatgatttagatatgcaagaaaccccacagattttgaagttttcatatttgaatgcatattatcaaactggggtaaaagatttaatcgataaggcggtaattgatgccgcgggcgatgaactagatgtaaacgaaattcagcgtgattacaataaaattgacgaaattccctttgactacactcgaaaaagaatgagcgtggtagtggtagataacgatgaacaccacgggcagcacttattagtaactaaaggtgccgctgaagggatgctggcaatttctaataaggttgaacttaatggaaaggttgaggatttaactactgcctggcgagaaaagatcttaaatcagattaatgaattaaacgatgacggtttacgggtacttttagtaggttataaattaaatcctgccccagtaggtgagttctctgctaaagatgaacatgatttaaccattattggctatttggcttatcttgatccgccaaaagaaacaactaaagaagcgctggaagatcttaaaaaagattatgttgatgtcaagatttttactggtgataacgaagcagttactcgtgctattgctttgcaggtgggattaaacgttgatactgtttatgacggcacccagatcgaagcggttagcccggaagagttgcgtgaaattgttgaaaaatgcgatatatttgtgcgaataaccccggaattaagagtaaaaattattaatgcactcaaagcaaacggtcatacagtcggttatatggggaatggcaataaagacgctttagcaatgaaggtagctgatgtgaccgtaacttcgaatacgtcagttgatattatcaaagagtcagccgatattatttttgagcaaaaagatttgcagctgttagaagaaatgattctaatgggccgaaaagtcttttcaaatacaatgaaatatattaagaccttcttggtaactaacgctggtagtgtaattgcgatggttgtttcatcgctgctcttgccatttttgcctcttttgccattgcaagttttaattttaaatttgctgtttagcataagttgtctggttattccctttgatagtgtttctaaaaactatgtcaaaaagccacaaaaatggtcgattaagagatggccgaagtttgtacttaattttggtccgattctagcaattattgattttatcgcaatgggcttgatgttttatgtgatttgtccatatttagtagggtctaattatcatcattgggtctttatgacactattttattcggggatttttgtggaatcgctttggacaagaattatggtgattcacactttgcgtgatgaacgttttccattctttaagcaacatgccacgccagtggtgttcttggtgaccattggtatggcaattattggtacaatgttgccttcatcaagtatcgcgccaagtttgggcctagctcaattgccgtttggttattggggcatagtcttcttgctagaagtaatctacattttactgacgactttggttaagcacttatatttaaaaaaagaaaaattctgatttgaattaaaaggaattgctggttttagcccaattcctttttttgcatgttaaaataaaatagatattttagacgattaaaggagtttgattaatcaatggctgataaagatactttttatattacaaccccaatttactatccatctggtcgcttaacgatcggtaatgcttatactactattgcagctgatacaatggctcgttacaagcgcagtcaaggctacgatactttctttttaactggtactgatgaacacggcttaaagattgaacaaaaagctgaagcacaaggaattaagccacaagagttcgtcgacaagatggcggcttcttacaagaaattatggaagagtctcaatatttcttacgataagtttattagaacaactgacaaagagcacgtagctgccgtacaaaagatttttgaaaaattattagcaaaaggtgacatctacctaggcgaatatactggctggtactcagttgaagatgaagaatactttactgaatcacagcttgctgaagtttacaaagatgatgatggtaatgtaatcggcggtaaggctccaagtggtcatgaagtacgtttggttaaggaaccatcctacttcttcaagatgagcaagtatgctgaccgtttggtggaatactacaaggaacatcctgaatttattttgcctcattcacgtgaaaaggaaatgcttaataacttcattaagccaggtttggaagatttatcagttacccggactactgttaactggggaattcctgttctaagtgatcctaaacacgtggtttacgtttggatcgatgcactttcaaactatattaccgctttgggctatggttcagacgatgattcattgtttaagaaatattggcctgcagacgttcacttggtaggtaaggaaattgttcgtttccacactatttattggccaattatgttaatggctcttgatttgccacttcctaagcacattatcggccatggttgggtattgatgaaaaatggcaagatgtctaagtcaaagggaaatgccgtttatccagaatcattgactagtcgttatggtgttgatccacttcgctattacttgatgcgtgctcttccatttggcgatgacggtatttttacaccagaagactttgttgaaagaattaattatgacttggccaacgatttgggtaacttacttaacagaaccgtgtcaatgattaatcaatatcaagctggtcatgttgatgcagttcccgttgctcaagctgaatttggcaaagacttgcaagatacagctgctagtgtcattaatgattatcgcgaaaatatggattcacttcacttttcaaaggcattagacaatatttggaagttggtttctcgtgctaacaagtatattgatgaaactactccatgggctttgaacaaagaaggtaaaaaggaagaacttagcaaggtcatgagcaatttggctgaaagcttgcgtttaattgctattatgattgaaccagtaatgaccgaaactgcaccaattatgttcaagcaacttggtttaaattgggacaatgaagacgctaagcatttggcctttggtgactttgattgggatgttaaagtaattgaaaaaccacaaccaattttcccaagacttaagatggacgaagaagttaagtacatcaaggatgaaatggctaaagctaagccaaagaagaccactagaagtgaacaaaagaagggtgacgaaatcaccattgacgattttgacaaggttaagatccaagtaggccaaattttgtcagttgaaccagttaaaggctcaagcaagttgctcatgttcaagctggactttggtaatggcaaggaaacccaaattttgagtggtatccgcaagttttatccagatgcaagtgagctattagacaaaaaggttttagctgttactaacttaaagccacgtaagatgctgggtcaccttagtgaagggatgctcttatcaagtgaaaagcatggcaaaattaagttagctcttgttggtgatgaacatgcagttggggctgaactcggctaatggagatcattgataatcatactcatttgaatgacgagccgtttcgcggcaaggaacaatattatttagaacgagcaaaagcacttgatgtaaccaaggttatttgtgcggggcaagatcctgactttaatcaaagagcggttgacttagcacaaaggtttgataatgtctatgcgatggtcggttactgtcccgatgtggctaaagactatgatcaacaggctgaagataaactaattgaacaattgaagcagcctaaggtagttgcaatgggcgaaatcgggctagattattattgggatgaatcgccgcgcgacgtacagcgtaatgtttttgcgcggcaaattgaagtagcacatgacttgaagatgccagttgatatccatactagggatgcatttggagattgttataacatcttgaaaaatagcaatctggaatatggtgctgttttgcatagttttaacggtggtgttgactggttaaataagtttttggatttgaatgtttacttttcatattcaggtgttgtttctttcactaaggctacggaagtacacgagagtgcaaaagctgcgccacttgaccgaattttagttgaaaccgacgcgccatatttaacgcctaagccatatcgtggtcatcaaaatgaaactggctacgtacgttatgtggcagaagcaattgctaagttgaaggatattccactagagaaagtggcggatgctacttataagaacacagtgagagtttatgggcttaaataaaaagaattttgatgcggtaatcgttgttgaggggaaagacgataccatccgtttaaaacaatttttcccaggaatcgagacaattgagactaatggatcagccgtttcagatgaagtattgaagcaaatccaaaaattaagtgagagtcggcaaattattgtctttactgatcctgactttaatggcgaaagaatccggcgcattgtaactaaagctgttcctgatgcaaagcaagcttttattacccgtaaggaaggcgaacctcataaaaaggggagtctaggtgtagaacatgcttcaaaagaagcacttgagcatgcactaagtgatttgcatgaggttgaaccgcaaaaaagtgatttaactccagcaatttatcggcaattaggtttagctggtggtagcggctcacgaaaattacgtgaacaagtaggcattaaattacgagttggctatggcaattccaagcagttttataatcgcttgcatacttttggcgtttcattagctgaattaaaggcagctgtcaaggaggtagaaaatgacaaataatattccaattggctctccagttagaacacaagcaattgttaaccgttactttgtcaaagctaaaaagaacttagggcaaaatttcttagttgatcagactgctattttaggtattgttgaagctgctgggataaaaaaagatgatcaagtcattgaaattggaccaggtattggctctttgactgagcaactactgttggcaggtgctaaagtttttgcttatgaagttgatgatagcttacctacgattttacagaatgaactgcctaagaaaattgatgatcagcctttggctagtcgctttaagctgatcttgaaagatctattaaaagcggactttaaggtagatattagtgacttctttgattttactaagccaattaaagttgtagctaacttgccgtattacatcactacgccaatcatttttgccttagctgaatcagatttgcactttacttcattgaccttaatgatgcaaaaagaagtagcagaacgattagaagcccaaccaggcagcaaggaatacggtccgttgactatttccgttcagaccgaaatgaatgttaaacttgctttgcaggtgagtcataattcctttatgccgcgaccaaaagtagactcgagcgtagttgtcttaacgccactgaaggaaaagccagcaattgaaaatcgtaagcattttatttgggtagtgaaaatgtgtttttcacaaagaagaaagacactcaataataatttaaaagctttgttgcctgataaaactaagcgtgatgaattatttgcggaattaggggtaaatccaagaattcgccctgaagaattaacaattaaacaatttattaaaattgctagctttattcctgcaagatgatgtataatattgaatttattatatatttgtgataaaatgttgctaaaggagctgttgtttagtgccaacatcaattatcacaattaaacataagttggattctcacttaggtgatactttaacagtagtagctcaagcgggtcgtaagaaagttactaagagacggggaattctaagagagactttccctgcagtgtttgtggttgatttagaccaacatcaaaataattttaaacatgtttcttacagttataccgatttactaactaagaatattgcattagagtttgatgatgaagctgaagaggctgaagcttaaacacaatttttgaaattgtcactagcatttatttaaaatgttagtgcttttttttgccctttagagtatattaattaagtataaaccaaacattagaaaggagatttcatgaaacgttcagaaagattggtggacatgaccaaatatttaatggagcgtccccatactttaattgcactaccattctttgctaagcgttacggcgctgctaagtcatctatttcagaagatttagctattttgaagcacactcttgccagcaatcaagatggtattttggagactgtagccggtgcagctggtggcgtgcgctatattccatttttaggtaaaaaacacgcggaagcatatttgtcagatttatcaactaggattgaggatccaagtagaattttaaccggtggttttgtgtatctgtcagatattttaggcaatacgcaagatttacgtaaaattggtgaattagtagctactcattatgcttatgaagaaatcgatgctgtcatgacagttgaaacaaaagggattgctttagccaaagcagttactcgttttttagatgtaccatttgttacagctagaaagcgatcaaaggtaacagaaggtgctactatttctgttaactatatttcttcatcgttgtctcgagtatcgaagatggaattaccgactcgtgctcttaaaaaagaagctaaagttttaattgtcgatgattttatcaagggtggcggtaccctaaccggaatggaagaattagttaaggaattcgatggtactattgccggcgtttgtgtactctgtgaagccgattttgacaaagaaaagctgattaagaactatctttcattagtaaaaattagtgaaattgatactgcccaaaagctgattgtagcagaacctggtaacttcttaactgaaactgattttgaccgtttctaaaatggtatactagaatcaagttttgattattaagaggttaatattaatggaaaaatatgtagttgttcttgccgcaggtaagggcacacgaatgaagtcaaagttgtacaaggttttacacaaagtttgtggtaaaaccatggttgagcatgttgttgatgcagctcaaggcgttaatcctgcagaaatcgttacaatcgttggtacaggtgctggcgatgtagaaaaagtactggcagacaagtctaagtttgctttccaagaaaagcaattaggtactggtgacgccgtaatgactgcgcgtgaagaattgggtgacaaagatggtgctactttagtagttactggtgatacaccacttttcacaactgatacatttaatgaactattcaagtatcatgcagaaaaaggcaatgctgcaactgtattgaccgcggaagctccaaatccatttggctatggtcgaattattcgtgatgatcaaggcaatgttttacgaattgtagaacaaaaagatggtaaaccagaagaattaaaagtaaaagaaatcaatactggtgtattttgctttgacaataaaaaattatttgaagcattgaagcacgttaataatgacaatgctcaaggtgaatattacttaactgatgttttagaaatcttgcgcaatagtggtgaacgcgttggtgcttacaagatgcctgactttagtgaaagccttggcgttaatgaccgtattgcattagctcaagctactaagactatgcaaagaagaattaatgaacagcatatgcgtgatggtgtttcatttatcgaccctgatactgcttatattgatgcagatgttaagattggcaacgacactgtaattgaaggtaatgttgtgattaaaggaaacaccgaaattggtagtgattgctacattactagtggttcaagaatcgttgattctaagattggtaataatgtcactgttacttcttcaactgttgaagaagctgaaatggacgataatactgacatcggtcctaattcacaccttcgtcctaaggcaattattcgcaaaggtgcacatattggtaactttgtggaaattaagaaggctgagattggtgaaaatactaaagtaggtcacttgacttatgttggagacgctaccttaggtaaagacattaacattggctgtggtacgatcttctctaattacgatggtgtaaagaagttccatactaatgttggtgatcatgcctttattggtgctggctcaacattgattgctccaattaatgttgcagatcacgcctttattgcagctgataccactgttactaaggacgttaataaatatgacatggcaattggccgtggccgtcaagttaataagccagattattggcataagcttcctctttctcaagataaagaatgggattaagaataaggcactagtgtatcaagctagtgcttttttgttaagaattgctaaatacttattgcaaaataataattgagacctacaataaggtgtactaataataatttttacatgaggtaggtaatacaatgaaattaagtcataagttagttatggtttcagcagctgttttgatgggtgttagcccagtattaggcatggcagaaaatactgtatctgttcaagctgctactaagagtactaatggcgtacataatacttacggtaaaaacagcaaagtcaaagtaactaagactatgaagtttgtcgaccgtaatggtaagaaaacttctaagactgctcctaagggtggtagctacactatttggaacgtcaagaatatcgacggtcaagtttactacagtattcaaactgatttgaagtactggattcctgcaactgcaactgaaggtacagtaacttataagtcaggcaatactacttatactttaaagagtgatggcaagaaggtaacaacttctacttcaactaagaaggctgttaagaagactaattcaaataaaaacactaaaaaagtagttaaagaatcaactaaaaaaactgccactaagactactaaaaaaagcaactcagaaaagactactaagaaaacttcatcaaagaagacgccagtggctaaggcagttaagataactactaagaataaggcttacgtttacgacaagaatggtaagcgtgtaaaaaactatttaggcactagttacattggtaaaaagatcactgttaaaggtttaggtactaagaccattaatggtgttaaatattatgctttgcaaccaaatcattattacattaaagcttcagatgtaactgttaagtaataattgataggaaaaagacactttttcgtttctaaattggcaaaaaaatattttagatctacaatatataaatgaactttaagtttagtaagaatgaggtatttatcgatgaaattaagtcataaattagttatggtctcagcagctgcattgatgagtgttgctccacttttgggtactgcagaaaacgtcaacactgttcaagctgctcctaagaagactacttcaaagaaggcagcaaacaacaagatcactttggtacgtaatgcttatgtgtacgataagaatggtaagcgtcttgataagtacatgggcagtgcaaaaaacactactattgctaaaggcgtaactgttacttcaactggcactaagactatcaatggtgtaaagtactacgatcttggtggtggtgcttatatcaaggctgttaacgtagatggtaaagctgcgtcatcaacttcatcactgtcaaagggtactaaggctaagtttgtttctaactcatacatttatgacaagaacggtaaacgtatcagcaagtaccaaggcaaatctaagtttgttaagggtgattcagtcactacttacggtattcaaaccattaacggtaagaagtattaccaacttgacaagaagggtactgcttttgtacgaactgttaacattgatggtaaaaccacttcaaaccaagaatcatctgtttcaaatgatgcagaatcaactaaaaaatatgactactcattaaagaagaatgcttatatttatgataagaatggtaagcgcatcaacaagtaccaaggcaagtctaagcttttaaagggtgccgcaattgatgtttatggcattgaaaccattaagggtaaggattactaccaacttgacaagaaaggcactgcttttgttaaggcaagtaatgtaactagaaccgttaaggcaacttcaattaccatgaagaagaatgcttatatctacaatggtaacggtgacaccaagaagaagacagttaagaagggtaagactgttaaagctactgaagcaagatacattggtactaagctttactacaagattggtgataatcaattcgttaaggctgctaatgtaggtaaaatttcaggcccagaactagaaccagttaacgaaccagatggtgctgctactgttgatactggtgataatactgtagatccaaacgtaaccaaggtaactacgattaatgttgctccactttacaacattaagggacaaccagataacgttagagcatttggcgaaggtcaaagtcaacaagtttcagaattgagatatattgcaacttctgcaactgctaccccagaattattctataaattatcaagcggtagaggctatttaaagcagtcagacgttgctgtaagtggtaagattttaactcctgttaacactccagaacaagctagagcagacgttacagttgctacagcagctgataagactaagttgcttcaagacattaacgaagcaactagtgttaagaactcagaagcttacaagtttgcttcaagtgatgccaaggctgcatatgatagggcaattacaaatggtactgctgttaacaacgatgctacagctactattgctcaagttaacgaagcagatgctgcaattgttagcgctaaggctaaacttaacggtaagaaaatcactgtatcaagcattagtaatttgactccagcagaagtaacttcaattgtacaattggttgcaactgctaataatgtaccagaaagttcaattcaactttcaaatagtggtgctttgacaattgttactaatggttatactcaagttttaaaccttagtgattatgttactcaaacttcagcaacttcaactaactagaaatgcataaaataagacgtagtatctgaaaggacactacgtcttattttttaggatattttcgttgtactagaaagtacaaatatattctaacttttttagcgattaatagttagtgcttttttatggttgcggcaaaattcttgctataattaaggagaatgtggttctttttagagcaacttttgctaaaatagagctggttaaatatttttacggaggaaattatgtcctataaagacgatatgatgatcttcgcccttaactcaaatgtaccattagcacaaaagattgcggatcgtgtgggtgttccactttccaagtctagtgttgaacgtttcagtgatggcgaaattcaaattaatattgatgaaactgtgcgtggtaaagatgtctaccttgtacaatcaaccagtaagccagttaatgacaatttaatggaattgttgattatgattgacgctgtacgtcgtgcaagtgctcgtacaattaacattgttatgccttactacggttatgctcgtcaagatcgtaagactcgtgctcgtgaaccaattactgctaaattggttgcagacatgcttcaagctgcaggtgctgatcgcattctttcacttgacttacatgcaccacaaattcaaggtttctttgatattccagttgataacttaatgggtgctccacttttggcagactacttcttgcgtaacggcttagagaaagacgctgttgtagtttcaccagaccacggtggtgttactcgtgctagaaagcttgctgaattcttaggttgcccaattgccatcgttgataagcgtcgtccaaaggctaatgttgctgaagttatgaacattatcggtaacgttaagggtaagcgtgctatcatcattgatgacatgattgatactgctggtactattactttagctgctcaagccttaattgatgcaggtgctactgaagtttatgctagtgcaactcatgctgttctatctggtccagctattaagagattgaacgattcaccaatcaagaatttggttttgactgattcaatcaatcaaccagcagagaagaagcttgacaagatgcttttggtatcagttggtccattgatgggcgatgctattaagtgtatccaaaaccatgaagcacttagcccattgttcaacaccagatacgaagctgacaagaacaagtaagataaaatttgataataaaaaatggctagccgatgaggttagtcattttatttttttttgaaaaaatcatcaccatttataataaataagagtgtattaaaatacacatgagaaacatctataattagagatagatgtttttcatttaaagaggacaaaattatgacacaatatttatcattcgatattggcgggactaacttgaaatatgcattaattgatcaagaagggcatattcttgaaaaagaccgggtaaagactaatactgaaaacctagatgcattcatgcagacgatgtatgaagtcgctgacaagtatcaaggaaagttcgctggcattgcagtctgtgctcctggtaagattgatactaagaataaaattatctattttggtggagccttgccattcttagatggcttgaatttagaagagactttaggtaaaaaatatgatgtaccagttggcgtagaaaatgatggtaaagcagctgctttgtcagagcaatggctaggcgaattgcatgacgtcaatactggtatcgcaattaccttaggcactgctgttggcggcggtgtcatagttgataatcgtattttacatggctggacttttcaagctggcgaattgagttggatgattacgaattcaagtattggtactaggaatatggctgcttatgctggctttagttgttctgcggttaatatgatcaaaaaagttaacctggctttggggaatatcgatcttgataacggcttgaccgcgtttgaggcaattaacaatggcgatttaagagcactagccgtttttaaacgctattgccgcaatgtagcaatcatgatcctcaatattcaggcagtaatcaatggctctaaagtaattattggtggcgggattagtgcacagccaattttgattgaagaaattaacaatcaatttgataaaattttgcagaataatccaatgttgaataatcaagtgattaagccggtgattgtggctgctaagcatggcaatgattctaacttatatggtgcactttatgcattactgttggaattaaatgacgaagaagttaggtaaatattgcaacacaaaaaggggatgcgtcgcatcccttttttacatgagctaaataataatttaatctttgccagaaacaatcttggcaatcgcaatgctggcaccagcaacgcaagctaccatggcggttttacaaccaatcttgactacgtcttttaccaaatccttattttcatgaatgaagtcaaaagacattttagtatagtccatgcaataaccatgaactgtgtccatcaagtctttaacttgagtatagccgctcttaggttctgcctttacttcatcttctggattaatttgagttcttacatctgtatttaaatcatttctgttcatcataaatacctcgattctaggatttaccttaattttacttcttttgctcacgttttggtcttctcaaatatcttaaggcaccattcttaatatatttttgaaattgctcataaagtggatcgaaaatttgcggctgatcttcatcgtgactgagcatagttttagggaagaagaagcgttcatctccttggaaagtaccatttaatgcgcgaaccaatgggctgagttgggataactcaatcatgctgccgtcgtcttgcataatttcaatttgactattagcatttttccccgttggcttataagcatcatatggttcatcgaatgcggaattggtagcggtatagtaatcaggattaaagccagcttgcttgattaggctcttgagcttaggtaaaagatttttggtttcttcatcgattcggacactagctagcggttttctgtacaagtaacgcttggctaggtcagataagattggatcttgtgcctgggtccacatagaaaaattagtttccattactccatcatcaagctttaaataatcgtctaaagtccaattgccttcaaggaatttagtcaagctaggtgtaacttgcagatttccctttttataaacagtttgagcgcgctctaaaaggtgatgcaagatgacttccattgagcgtcctacgcggtggaagtagacctgttggtacatctgatagcgtgacacgatatagtcttcaacggcatgcatcccattgttggcaaaacaaataccattttgataaggacggattacccgtaaaattcttgataaatcgaacctaccatagttaactccggtgaaataagcatcccgctgcaaataatccatccggtcagcgtcagcttgacttgagatcattttaaccacttgcggattaggataagtcttagcgattacgctggcgactaattcaggaaagttaggtgcaacttgttttaatgcatggttaatttctgtattaggatcagtaatgatcttttgtccaattttttcatgattggtgccaaaaaggtgctcgaatgtgtgcgaatagggcccgtgaccgatgtcatgaagcaatccggcacattctaccagtaatcgattatcatcgttccagagaccgtctcctggcgtaattgagggatattttttgctaaagatatcgcaaattcttctcgttaattcataaacgcctaagttgtgctcaaatctagtgtgagttgcacctggaaaaacatagctaacaggacctaactgtttaatgcgacgcatgcgttgaaattctttagacttcagtatgtccaaaacaactttatcttcaatatgaatatagccgtgaaccggatcacggagaacaacctcttgttttaatttttcgctttgaaatcttgtcataaaaatccaccaagtttaatttattaattttttgaactatatataataaaatagattatatctaactaaaattatatcagagatatagtaataatgtttaaagggggcgcttgtttgacagcaattacgattgatttgactagtaaaattactcaagacgatgagacagagacttttacgcgacatgcgcaagggcaattgactgaagaaggcgacgtcacacgaatttcttatgccgaagaagggcaaattccagtgaagatgcttctaaaggagaatgaattgttgattcgccgcggcgttgacagcaataattattctttaatgaaatttattccgggtgaaaaaggcaactgccgctatgtagttgaagggcgccgcatggacatgaccagcgtgactaacttgcttgaatatcagagtcaagatgatggttcacgtaaacttcgggttgaatatgacctctttaatggactatacttaataggtaactatgcagtcacgttgatttttacttaaaggcctagtagaatagtaaagattgtataagagaggacgtacagctgtgggattagacaaatttaaagacaaaaatcgcgatgaattgtcaatgatcgaagttgctcgtgcaattttggaagacaatggcaagagaatggcatttgccgatattgttaatgccgtacaaaaatacttgaataagagtgacgaagaaattcgtgaacgtttaccacaattttatactaatatgaacactgatggtgaatttatctcaatgggtgaaaatgtttgggcacttcgttcatggttcccatatgaatcagttgatgaagaagttaatcaccctgaggatgaagaagacgattcacgtaagcaccacaagaaggttaatgccttcttagctagcgctactggtgatgatgacattatcgactacgataacgatgatccagaagatgacgacttagacgccacagacgatgatactgatgatgtattgccagatggcattgaaggtcaattgtcacaattaaatgatgatgatgatgatgacgaagaagataattaatttgcttgacttaagaagaaaaagcagataatatttttgttgggcaccctatgtgcgtttagctccccgttagtgggagcttttttgtttaaaggataagttaaaaggagcagaacatgacaaaatacatcttcgtaactggcggtgtcgtatcttcacttggtaaagggattactgcatcaagtttaggtcgacttcttaagaatcgtggcttgaaggtcactatgcaaaagtttgacccatatattaatattgacccaggtacaatgaatccataccaacacggtgaagtttatgttaccgacgatggtacagaagctgaccttgacttaggtcactatgaaagaatcgtagatgttagaactagcaagtattctaacgtaactactggtaagatttaccaagaagttttggaaaaagaacgtcgtggtgactaccatggtgctactgtacaagtaattcctcatattactgacatgatcaaaaagaagatcatgcgtgcagctttgactactgattcagatgtaattatttctgaaattggtggtactgttggtgatatcgaatcaactccattcatggaagctattcgtcaaatgcgccgtgaagttggtccagaaaatgtaatgtacattcactgtactttggttccacttcttcacgctgctcatgaaatgaagactaagccaacacaacactcagttgcggaattgcgtagtattggtattcaaccaaatatgctggtacttcgtgctgaacaaccaattgaccaagaacacaaagacaagatttctacttttacagacgtgcctgttgatcgaattattgaatcaattgatgctccttcattattcgatgtgcctttgaacttccaaaagcaaggcatggatcaaaaagtctgtgatttcttacacttagagagtccaaagccagaagctgacatggaagcttggaagaagcttgatgaacgtgctaagaccttgaagcatcacactaagattaccttggttggtaagtatgtagagcttgaagacgcttatatttcagttactgatgctttgcaacatgctggttatctttacaacactaagattgatgttgataaggtacaagctgaagacgtaactgaagataatattgcagaaatcatgaaggattcagatggtttgattgtccctggtggttttggtactcgtggtcttgaaggaatgattactgcaattaagtatgctcgtgaacatgacatcccattcttaggtatttgtttggggatgcagatggctagtgttgaatttgcacgcgatgtattaaaccttgaggatgctaattctgcagaagcagagccaaactgcaagaataatattatcgacattatggctgataagcgtgatgaagaaaatattggtggtactttgcggttaggtatttacccagctactcttaagaagggaactaagactcgtgcggcttacgatgatcaagatgttattcaagaacgtcaccgtcaccgttttgaattcaataatgaataccgtgaagcctttgaaaaggctggtatggtcttctcaggcgtttcaccagataaccgcttagttgaaattatcgaattaccaaagaaaaaattctttattgcagcacaatatcacccagaatttttgagtcgtccacaacgtccagaaggcttatttaagtcatttattggcgctgctagtggtcttccagcacaagaattttaaagtgattaaagtttgattatacaaaatcttaagaaaacaagaactgagagacctcagctcttgttttttttgtaaatatcctttaacattattatgattaattgaaagtagaaaaggatttgttttcgccaatgaagcagatgataattcatggtggaaagcccctgcagggtgatgtttggatcggtggagctaagaactcaacagttgctcttattccggcatcaattttatcaagaacaccagtgaccttggaaggcgtcccaagaatagctgatgtagttaacttgatggacttattgagtgagatggatgtacattgtgatttcggtgaaaccactttaagaatagatccaactgatatcaagatgagtccgttgccagctggtaagattaagagtttgcgcgcttcatattactttatgggtgcgctacttggtcgctttggcaaggcagtagtgggcttccctggtggtgacgatattgggccacgtccgattgaccaacatattaagggctttgaagccttaggcgctagcgtaaaaaatgaaaatgatcaaattataattactgcaccagaagatggtttgcatggagcaaaaatccatttaaagatgccatcagttggggcaacgatgaatattattatggctagtgtgacggcacagggccagactataatcgaaaatgccgcaaaagaaccggaaattattgatttagctaccttcttgaacaatatgggggcagttattcgtggtgctggtactgactctattcgaattgaaggggtggagcagcttaaagcacagattcctcatacgattattccagacagaattgaagcagggacttatgttgctttagctgcctgtattggtaatggcattcgcattcataatattatcgaagaacaccttgattcatacctggctaaagttgaagaaatgggtgtagtaatcgattcagatgaagattctttgtatgtttacccagcgggcgacctaaaaatggtccaggtgaagacagatgtttatcctggttttgcgacagatttacagcaaccaattacaccacttttattaactgctaaaagcggtgaaggtgtagtaatcgataatatttatcctaaacggattggtcatattgctcagttgcaaaagatgggagccaatattaaagttgaagataatattattttggcccatccaactaagcagtttcatggtgcggaagtaactgcaggtgagattcgagcaggtgcctgtctgatgattgcaggcctgatggctgatggtacaacaacgatcgacaaggctggtaatatcttgcgtggttatgatcgggtccaagaaaagctgcgtcaacttggagctgatgtaactatcaaggatgatcctgctgtaccgggtattttagataatatttagtaaataaaaaccacatggaaaatctccgtgtggtttttgtaatgatatgtcgatttgtaggtgaacaaatgagtttaatttttacaagacgtgcacaaaattcagatgtggataaaattgtgcaaattttaaatgatgcgacttcttttttaaaggaaagtggctcatcgcagtggcaaagtggctaccctaatcgagcaactgtagaagatgatattaaaaatgggtgtgcttgggtattaactgtggataatgaagttgcaggttatgcggcagtggtaattggccgtgagccaacttatgcggatattgaaggcaagtgggaaaataatgtggacacctatgcgacaattcaccgcattgcagtttctagtaagtttagaggaatgcatttgagtcaatttttcttgagcaatattatttctctaacttatgcacaaggaattcacaattttagaattgatacaagccggaaaaataaaattgtccagcacattgcagttagtcataattttattgaacgagggattattcaagtaactgaagatccggttgattcaagtagaatagcttacgagttgaatttaaggtaatgaaaaaccacatgggatgtgaattccatgtggattatttttttgctttatttattaatcaagcaagtcgtatttcaaagtcattaaaccatgaccttcgtcaaccatttgaccaagcagttcaacagtgttgttataaactgtatcagacatcttttgattagcagcaattaacttgtcttgtaattccttacctgaaaggttctttgcttctttgtcagtatcatgttggatcttgtgacattgtgctaaactcttttgttcaaaggcgtcttcaagttcaccgtaaacacggtagttggtatcgcctaattgagcagttaacttgttaagccagaaaatcttgctcaagttaaacttaggagtggtttgccaagcttcaggggtagtagtgatattagtatagaatggcaccattgagttaaaggtgttaggaccaaaggctaaccattgtacacctgcaatttctgcaggaacatcattacgaatttgcaaaatatgggtttcaaagtttctgttaataccgataggacggaaggtcttcttttgttcaggagtaccttgatcgccataagcatcgtaaggagtgtcttggtagtgtgagctttcggcccatttaatatcttcaattgagattaaacgattagcatggcagataaaaggttgatcttgatctgctggagtaccaccaaagtctggatcgaaatagttgtgaatataccaagcacgaggattattgtagtgagcatccttaatagttgaagaaccaaagatgtggcgcatgttgtagccttcacggtctggattcaagtgatattcttcgattaaatcctttaggtctgctgaacaagcaaaattatcagaatcgttgaagtcgaaagtatcaatattcaaacggtttggtgcaataacatatgcatcatctgggatacggcgtgcaatccaatgatgaccaccgatagtttcaaggtaccaaatgttatccttatcagaaaaggccataccgttcatttcataagtaccgtatttttcaactaaatagccgacacgtttaacaccgtcaaaagctgagtgcaagtatggtaaagtcaaagtgacgaaatcttcttcaccaagaccaccttcacttggatcaagtaatgggtcaacaccttggatgcgtgaattagtagtgatggtttcagtagcggtcatggctacattttcagcgttaattccagctgcgccccaaataccatttttgcctgaaacatcaggtgctgaagtatagcgtaatggtgtttctgctaaatcagcgtcgtcaatcttttgtttagaaattacactagtgtagtgcttaggttggtcagctgggttaacagctttaaagccttcagggatgatgacgcgaccaccgtcttcactacgagcgatcatcgtagagccatcaatagttgcttttttaccaactaaaatagtagtacattctgtttgtttcattggatcattcctttacttttattatgtttaaattatttcctaataatattgtatgcaaaaataatccgataaggcaaagaatataattaatttccccgaaaggcatttggactaacaccgctatagcgtttaaatgccttggagaaggtaaattcatcgccgtagccgactttttgagcaacttgccttagattgtgcttggtattaattaattcttttttagcggcttccatgcgcaattgcatgaggtacttttgcggcgataatttagtgttttttctgaacaaagcatataaaaagctgcgtgatactcctagcctatgacaaagttcaacaatattgcaggtaggatcggtataattttgattaagataattaatagcgatttgatattgatcatttttaggtgttttgcggactggtggatggttaggaaagtcttttactagatgataaaaaagttgataagttaaagctgaaatttttaaattgtttaataaggtctttttcttcgccaaacattgataaaggtcatctagggtttgataaaaggcagttttttgaatttgacgcaagaaatttttattaggtaaatttgatgccttgatgctttcattaacgccgttgccagctaggccaatccagaagtattcccagggttcattgtggtcagcttgaaaggaacaagtttgactgcgtggaacgtaaaaaagatcgccagcttttaatttaactgcgtggtgtctactagaagtaaaggtaccagttccgctaataatgtaataaaaaatatcgtttttacgaagattgtcaccttgaaagaattcatcgggctgacatttttgtcgaccataaaacatgatgtagctatcaagattttggttatttaagttaggcatagacttcctcactgttgaaaaattatgttacttctattatagaagagattttgcttaaaaggtgaagaatgaaaaacgaccacattaagcggtcgttcgtgaatatttatagaaaattatgatatggaattatgaaatgaaaaggtattttacttattggcaccacttcttccattgaataaaagattaagcagagttgcacagatgctggctacgacgataccgttgcctaagaacaattgaatggtttgggggagagtttggaagatttgaggatagacagtaacgcccaatcccatcccgattgaaatggcgacaattagaatattgcggttgttctcaaaatcaactttggttaacattttgattccttgcacggcaatcattgtgaacatgaccaacatggctccgcctaaaactgagtcaggaatgatggtaactagagcaccgattttaggaagtaagcccatggccattaataagccagcagcccagtaaatcggacgcttagtcttaatgccggataattgaagcaagccgacattttgagaaaaagtagtgtaagggaaggtgttgaaaagcccgccgaagatttgtgctaatccttctgcacgataaccttttttgaggtcttcttcggtgatatcttgatgaagtaggtcgccaatggcaaagaagacgccagtggattcgaccaaggaaactaaggcaatgatgatcatggtcaaacaagatgaccattcgaattctggcaccccgaagtagaaaaattgaggcaaatggaaccaagaagcttcggcaactggctttaatgaaacaagtcccatgcagctagcgattagagtaccaacaattaatccaattaaaacggaaatggaacgtaagaatcctttagcccagacttcaatgacaacgatgatgaggatggtgataaaggcagcaataagatttttcgcatcaccaaagtccttggcttgggcatttccgccacccatgttttgaaaggccacgggaatcaaagttagtccaataactgtaattaaggtcccagtaactactggcgggaagagttttttgatttttgaaaaccatccggcaattaagaaaacaaagattccagcaacgataatggcaccatacatcgtgttaattgaaaacttctgcccgatcatttctaagggagctaccgcttgaattgcacagcccaaaacgactggcaagccaatgccgaaatatttattacggaatagttgaattaaagtggctaaaccacacatgaagatatcaatcgaaactaggtaagtcatctgtgtgctattgaagtgtagtgccgtaccaattaaaaggggaacggcaactgcaccggagtacattgccagcaaatgctgcaaacctaggacagcagcttttttgtgactaacttctttttgtgccatttttaattattcttctccctcgaagtgtacttgatcattttcaaagctatcgatttttgctagggcttcaaagcgtaagccttcgttttctacccattcgcttccgccttggaaggtttttgcaacaacagcaccaactccaacaatgtcgcagccggcttgtttagcaatgttaaccatgcctttgactgcttcaccgtgggcaacgaagtcatcgatgattaagatatgttcgcctgggtgcaaaaatttctcttcaacgcagatcttattgttgaccttcttggtgtaagaaaagacgtcagcccaataaactgcatcattcaaagtagacggctttttctttctggcaaagatcattggcacgtgcagttggtaggctgccatgacaccaggagcaatcccggacgcttcacaagttaagaccttatcgactttttcatctttaaaaaggcgggcaaattcttcaccaacatgcatcattagttgcggatcaacttggtgattcaaaaatgaattaattttaagcacatttccaggtaaaacttcaccatcttgtttaattcgatctactaattccttcaatattattctcctcaagaaagaaataaggacttcttctacctaaaacaggtaaaagaagtccttaagattattcttaactttcattcacctatagtccggtatttacggtaccgggtagagactgtcgaccttatttcgacgatatatagatatttgtgttggcttaatcttaacagaatatattgccgaacacaagtggaaaattaaggattaatgttcgattatagtcctgaattgtcaaattaagtgcaacagttaggctatgaggaaatatattgcttgaagagttcttctgctgtgtgatattggaggattcggcgatatttgtggttaatggcatcagttgcctgttgaacataagcttttgacttgtctttcatgctcttgcccttagggaagaattgacgcaaaagaccattgcagttttcattggtgcccctttcccatggagaatatgggtgagcaaagtaaatctggcagcccttgatcttggtcatatccgcaaactcagagccattgtcaaacgtgattgatttaaaccaggcaggatgtctgtcaatctccttttgaagcagcctttggcatgtgcttgcccgatagtcaggaatcttgataactacttcaaagcgtgtggttctttcagtcaaagtcattaaagcaggctgattcttgcgtctgacgcctttaaccagatctccttcccagtgcagcggagcttttctgtcttcaatctctttaggacgctgttcaatggaattgccaagatgcttcttgtgcaaagcgtgaccgccatggctgtgatgacgcttgttcctgcgtcttttgagcttcataggcagatcaatattgcttatgtccagcaagccctgatcaatatagcgatagacagttggtgtgctgggacaagggtagcctggcatagtccttttgaattcaccaacgaactcatcgatgctggtggcatcaaatttagctttaaagcgtctggagagcattctcaaaaagacagcataatgcttcaatggattgcgctgatagcagtttttgcgacgcttctcataataaatctgtgcagtatcagcgtaatagtgctcatacaataaatagctgctgtctctttgcaggacgcttccgcgtttgatttcgcgactgattgtcgacttatggcagccaacttcttgagcgataacagtacgggaagttatgccggaatccagcattgcttgaatttgtccacgttgtacgctggttaattgatgatagtgcttagaaatgctagaatttgaattggtcataaagatcttcctttcttgatttttcgtcacttcaagtttaggtcttcatggcctttttgtttaacacttagtgttgcacttcaattttaaatccggggttcgattatagtaaaaattattcagctgcgatatcgttatggcacagactgatgatcttttcgataatgccatataagatccccgcgattggccagatgatccagctgcgttcccaatcattggtaatgaagctatatcctagataaagtaagactgctattaaccaatagagtgtggcgtatttgttcataatcttgcgacagccggttaattggattgttaaattgcccaggtcaagcataatagctagggcagtagaaaagcaaaggatggctggactgcgaataattaaactaatggctaaagcgcgaaggctggcacttttttgagcagctgttaagtagccttgctcttgttgatcagataaaattggcaattcttcagttaagttattatctttgtggtttaattcaaaagaaggtgagccgcttttgagtaaataatcggtggtcactccaaataattctgataaagctacaattttttcaatatcgggaattgattgttcactttcccatttggatacagcttgccgactgacattcatcttttcagctagtgcttcttgaaaaagatgatttttcttgtgtaatgccgcaattttttgacctaatctcatgattgatcgtcctttcgttttgaaataatttgatttaacgaaaatttgcggttgcagaccaccactttttaattgcatttagcgcaactagtagttgcaactgctggttgctcaagataaaagccgaacaatgaatggctatttttaactttttgattgacctttttaatttttcctagtagagttagttaaaaatgcgtaattgaaaagagggagtaaatagtggctaagaatctagacgattttgataaaattattgtgcttgacttcggtagtcaatataaccaattaattacccgccgtattcgtgacttcggcatctattctgaacttttaccacacgatctttccatggagaagattaaacagatcaatcctaagggaatcattttctcaggtggtcctaacagtgtttacgataatggtgcattaaaggttgatcctgcaatctttaagttggatattccaattttgggtatttgttacgggatgcaattaatgtctcatgacttaggcggtaaagttgaacaagctgaaaacaaggaatatggccgcgccaacattacggttgaagatccagacagtattttgttcaatggcttgccttcaaagcaatacgtttggatgagtcacggtgatttggtaactcaagctccaaagggcttcgaagtaactgcctcaagcaaaaactgtccaattgctgcaattgctaatccagataaaaagttttatggcattcaattccacgcagaagtgcgcaattcagaatacggtttagacatcttgaagcactttgcttttgaggtttgtggtgctgaggctaactggaccatgaacgacttcatcgacatgaaggttgatgatattcgtaaggaagttggcgacaagaaagttatcttaggtctttcgggtggtgtagattctagcgttactgctactcttttacacaaagcaatcggcgatcaattaactgcaatttttgttgatcacggaatgctgcgtaaagacgaaggcaatcaagtaatgcaagccttgaacaaggatcttggtgttaacatcattcgggttaatgcccaaaagagattcttagacaagttgaaaggtgtaactgatcctgaaaagaagcgtaagattatcggtaaggaattcatcgaggtctttaacgaagaagctaagaagttaaaggatgtagatttcttagctcaaggtacgctttatactgatgttatcgagtcaggtaccaacactgcccaaacgattaagtcccatcacaacgttggtggtcttcctaaggacatgcatttcaagctgattgaaccactgcgtaagttgttcaaggacgaagtacgtgaacttggtgaaaagctgggcattccacatgacttagtatggcgtcagccattcccaggccctggtcttggtatccgtgttcttggtgaagtgactgaagacaagcttaagattgtgcgtgattctgatgcgattttacgagaagaaatcaagaaggcaggtttacaagaaaagatctggcaatacttcactgttcttccaggtattcgctccgttggagtaatgggcgatggacgtacttatgactacaccattggtattcgtgccgtaacctcaattgatgggatgactgcagattttgcccaaattccatgggatgtacttggtcacatttcagatagaatcgtcaatgaagtagataacgttaaccgcgtagtttacgatgtgacgagtaagccaccttcaacgattgaatgggaataaaggtgcttcctaacttgaatagagaatagcgatctaaaggcattctcaagtaggaaagtctatgaaaaaatataaaaaagcagatgattgtttgccaattgtttgccagaaaaaataaacttcttagttattaaaactaggaagttttttgttgtattgaataaaaattcattatcccattgtcaagagaagctatggtgtttgataatagaggtattaattattttagagattaggtggagaaaatgacagttgaatcaaaggcaatggatcacataagaaaagtattagaacaatttggaaataagtattttgcttctaatggagctttaaaacggacaacggttattgaggatttggataattacgataaagatttaatgactgctttattaagtgatgatttgttgcacaagacttatacttctaagattgcaggcgttgagatctttgaaattaacaagtttgttgatatgttgaagtataaggaatactgggcagatagctttactaagtttgataataaaattggtttaactgttggtggcaaatatattgatgattcagaagatgttgttttggacttcccatataaagatactgtgcttaaagctgggatgaccaaggaagatgttgagcatagtggggatgcagatgaatctttcttgaatgaaacactggccaaacctgaaattgatgaattgctagaacctaaaattcttgttaatgctactaaatatgataaaagtggaactcatagagcgaattctattaaaaatgatgatagtttaattcttaagggaaataatttaattgcgttatatagtttgaaaagtcgttttactgagaaggtaaaattagtttatttggatcctccgtacaatactaagtctgattcatttaaatataatgacaagttttctaactctgcatggctaacttttatgaaaaatagacttgaaatagcaagagattttcttactactgatggatcaatattcgttcaaatagatgataacgagatgccatatcttaaagttttaatggatgaaatatttggtaaagataactttataggaaatattatttggaagaaaaaaacaggttcatctgacactactagtattgctattgttacagaatatatattagtctacgctaaaaataatgcagaggtaactttctctaaaaatccggattcttatgataaaaagaggtacagatatactgatgaatacgttgatagacggggaccattctactatgacacattggatagaggcgggttgcagtatagtgattcattaaattatggcgtaacagcacctgatgggagtgtcttatatcctcatggaagacatgaatatgttaatgatggttggatctggaaatggagcaaagataaggttaaatgggggttggaaaatggcttctgtcaatttataaaaactggagataagtataaattaaaatataaagtatatttaaatgttaataacaaagatgaaataataaaacgaaatgccccttggaagaacgagactgtaaaatagtttgtgtaaggatgaatgattccttaaatttatttctttaaacattagaaaaaggagttcctttctcgtatgattggtttgaacaaaaaaacacatacagaaagaagaactccttcatgaatgattttaccaaagattttgctcaagctctattcaatccagacaaaataaatgatttattgcgcaaagagctacaacaggctgttaataacttgttagaagctgaattgactgcctttctgggctatgatccctatgccagaaatggctggaatactggcaactctagaaatggtgcttatttccgcaaagttcatacgcaatttggcccaattgaagtgcaagtgcctcgggatcgcaacggtcaatttcatcagcacacgctgcctgactacaagcagcactcggatatcttggaaagcatgattatcaagctttactccaagggcgtgaccaccagggaaatagccgatctaattgaaaagatgtatggcagccattacagtccagctcaggtatcaaatatttccaagcagatgattccaaaggttgaggcttaccacaaacgcaagctaagcgacaagtttttctgcgtctatttggatgcgacataccttcctttgcgccgagaaacatttgagcgcgaagcagtctatattgccattggcatcaagcctaatgggcacaaggaggtcattgactactgcattgcgcctagcgagaacattgaagtctggacagatatgcttcaaaacatgaaatcccgaggcttaaagcaagttgagctttttctttctgatggtgttgttggcatgaaaacagccttggccaggacttatcctaaagctcattttcaacgctgtttggttcatgtcatgcgcaatatctgcgctaaagtacgcgtcgacgatcgtgaaaagatcatgaacgaattcaaacaggtgcatcaacagacaaacaaagaagaagccacagctgtcctgcatgacttctataccaaatggggcaaggtttacagccatgttatcagaagcttgaaagacatagaaccagatctgctggtcttttataactatcccaagcagatcagagcttcaatttattcgactaacatgattgaatcatttaacaatgtgatcaagcgcaaagctaagcctaaggcagagtttccaactgaacagtcgcttgatgcttttattggtattcaggcaatgagctacaatgaccgttatttcaatcgaattcataaaggctttggtcaggttcaggacaccttagaatcctactttgattaaataaataattaaaaaatcaatttacgagaaagaactatttacacaaaagatttgacagtttcggaagaacatcattgaaggaattatgaatacgaatgctacttctgagattaataaattatttggaaataaagcttttgatactccaaagccagaagcattattaaaattcattataaatttaggaacatttgaagaagatagagtaatggatttctttatgggatcttcaactactcaagcggttgctatgaaaatggatagacattttattggcgttgatcaaatggattatgttgatactatatctgttccgcgacttcaaatggttattaatggtgagcaaggaggaatttcaaaggacgttaattggaaaggtggcggatcatttatttatgcaaaattaatgcctaaaaatcaaaattttgtaaaagaaatacaagaagcagaaaatattgaaacactcttcaagattttttatcgtatgaaacaggaagctgatattgattttagagtcgatcttgataaatttgagaggtcaattagtgaacccggtactccgatttttttacaggagtgtaaacgtgaattaatcagaatcttagataaaaatcagctttactacaattatgctgatattgatgatgcagatgtaagaagcaagctttctgataatgattatcaattcaataagagcttctattccctaaatgaaagtggtgaggaataatggctaaaacacaaaaaggatcagctagaaacaagccatttcctacccttgaaaaagctagaaattcaattaatagtttattttttgataatgataagcatgattttgcgtatttgaaggataatcttaaacataaattacgaagatatcaagagtctgcactgttgtatttatactggtcacaaattcaagataatgctgatgagcaatataatcagctattgtttaatatggctactggttctggtaaaacggatgtaatggctgctgctatactatatctttatcatgaacaaggatttaagaactttatatttatttctaatactactgctgtagttgataaaacccaagaaaatttttttaatagttcatcttctaaatatttatattcttcgccaattattattgacggtgagagaattagttttaactatgttaattctacttttccagtaaatccagaagaaaatactatttacattaagctgacaactattcagactttatccaatgaattaaatgatccgggtgaaaatggtttaacttatgatgatttggctaaattcaaaattgctattcttgctgatgaagcacatcactttaatgttgataccaagaaaagtaataaaaaagccaaggaagagaattcttgggagtctgtattagatcatattagaggattaaattcagcgaacagacagctagaatttaccgctacaattgatgtagataaaccagaagtatatgaaaagtataagaataaagtcatttataaatatgacttagatcaatttatgaatgaaggttattccaaaaaggtgtttagacttcaagctaatactgacaataatcagaagctgcttaatgctgttttattaaatgagtatcgtaaacgaattgccaagaagttaggcatccctaatttcaaacctgttatgttagtgaaatcaaatcgaataaagacttcacaacaggtagaacaagacttcttagagatgatcaataatttatcatccgccgatttagaaagctttattttaagaaatcagaagcttaatgcgaagagtagagctttaagcaaagcttatgaatattggctttcacaagatttatcgcaggctgtagcagaaatacagcaagactttaatttacgtacaactatcaatgtaaatgagggtggtaccaagggaattctttcagatagcaatgactttaaaaatttgaatagtctagaagatgaaaataatccatttagaattatctttgctgttgctaagttgactgagggttgggatgttttaaatctttatgacattgttagaatatctgaagccaaagaatcaattacgatgaataccactaatgctgaagcacagttaattggacgtggtgcacgttattatccatttgtttatcaaggcagaaagtcttacactaggagatttgatactggcagggatgcaacttttgagaatcagcttttagaaacgttgtattatcatacaattaacgattctaagtatattgataacttgaataagtcatttgataagatggacttaattgttaataaagatggtgaatatgatacatacactgccacagtcaagccttcgtttatgagaactaatttctataaacaaggtaatctttattacaataaaactgaaaaggttccagatgcgaattatgcaagtattggtgactatggtattaataatttgacaattgatgttgattataatcagtcaacaactgaaagtaatttgcatgataaatactatgataacgtggttcgtgaatcagatgttagatatgatgtagtagctgatttttctaatccaagtgattatcgattaattgaacgtgctttagctagaaataaattctatcgtttctcaaccatgaagaagtatcttccgatggttaaatctattagagagtttattacttctgatgattggcttggtaacttaaaagtacaagctaaggttccaaatgagtataatcaaattttatcaccatttgaaaaattacatattcttgataatgctttgaagattattcaaaaaaacatagttaaaaattatcaaaaagaacgtggtacaaatcaatttatacctattgcagtcaaagatgttgttaaagattatcagaaggtaattcctaagctatctaataagactattagcgaagtcataaagcctaagcctatgtctaaggctaattggttcccgtatgattgggcaattgctgatcaacttgaaacatcactaataaatagaattgaaagttggttagatgaattgaagcagactcataagaatatttatttgattcgaaatgaggaaactatttctacatggtcacttcatgaatttgaaaataatgaagttaaacattatgaaggttatatgcctgatttcattcttgttttagatgatggagatattatgtatcaagtatatatggaacctaaaggtgaccaattacttgaaagagatgaatggaagcaagaacttcttgaaagtattagacctgaaaatattgaaataattggtgaaacaaaagatgttagattgtatggcgtaaagttctatacaacaggtgatggacgtggaatttatgatgaattaaaaaagaaagaaatttttcattagcaaagttgtatgaatgctattaatgtatacttttatttgctatattggttttataaccaattagtattaatttctcttactacgtgttcgaaattgaagagaaaatttgtttatttaattactatacgtaattggttaagcagattttctctttttttatctattggttataaaaatgttgttattggtattgccatatactgtgttcttattgaaagagaggtacaaaaatggcaggattaaaaggccttcgtggctttcaaaagtttgatatcagtggattcttaagtggtaagcaattgttgctcatgggcatggaagatctcaaagatcgcgaatctggtaaagttgtcggtgcaaaaattaagacagttatctggacagatgacactgcttacagtaaggaaggcattaacaacgaaggtagtgaactcgacgttaaaattgagggattgaatgctgaaacagttgatcgtaacaaccgtggctttgttaagctaagaaatcctagaggtaccgtatatggtgattttcaaaatcaactttctgttaaggctgatggctttgactatgttgatgaaaagaaaaatggtgaaaaataatggcacaaagaattcgtaagcctcagcaaggtggcaatcctgagagtatcattcctaagttggatggtacttcttagcacttagtattcctccacgtataattgcaccatcgttaccatggttcgctaatttttgcgagtttgttagtaactttgctttaattctcactttaggatgcttagtttattggcttttattaaataaggctgatgtcaaaaactatataaatcttttctttggtaagaaagttcaaaatcaagttattgatttacggcccgttttaggtagaaagtttagaaacttcttagtggagatgggcatagtaattcaagatcccaatagattagatagtgtctatgttcctaaagttgaacagatttctgatggtcgccttaaggtggaagcaataggcgacttaaggaaaaggcttgtatctgaaagttttatttggggcctagagagttaccttaatggtagtggatttgatatattcgttcaaagtgcaaattacagattggatggatgtgtttacttcactttagttcgaggaactagatctgataggatgagtttttaacgtgaatacttctctatataaggttgcattatctaagtcgttttcttgggatgctgctaaacagataaatgcattagtgggtggaactcgcggctctggtaaaagtttttttgctttaggtgcacttgttcaactggctagttttccaagatttgatgaaagtaaattattgggtattggtacgttaccgaccccaatttttactatcgattttaaaaattcagatattgctaggctgggtgaattacttcctaaaaaaagagtagcagttaataaaaaagaagctattgctgttcttactcattttgatcaattaatgcatcgacgacttaaagtaattagagattattcttttggcgctactgcttctaaactaaaaatgcctttgtattatttaattattgatgaatggtcagcaacaaatgctgcttttatgagtggtatgacgaaagctgataaagatcttagatatagatggcaagcacttattcaagatatttctatgcttggaagggctgcagggtttggactaatcgtaatttctcagcaaatatccgtgactaactcggggattagttcagctgtgcaagaagaagcgggattaaaactacactttggagatgcagaaatgagtagttatagattaacttttggcaatgaagtacaaattcctgatgttcaacttaatgtgggtgaggcattcgcatggattgaaggggttacttcgtcaggatatgtaattccttttgccgctccttatgttgatgctgctaatatatggaacattttaacgcaagcattagcaagtcaagatgatgactattatcttgactatcggttgaggtgatgattggaaaagtagcgccagcaggcgcgttagcgctgtggcgctgatggttgcgaagcaaccatcttaacttgattaatgggtgattttagtacataaaaagtgaggtgacaagatgaaaactcagaataacaagaaacgaatcaacaaacatactaaagttaatgcctataagtatggcaatgtcttagagatgactaattctgttgcatctcatgatgctacaattttgccattgtctggaaatgagtatgttgacctttcaactggtgaaattaagcagtttaaaaatcgaaataagcttagagttcaatcgccggttaacttaaaaaagacatttcgtaagctaagaagaataattctagataactttagtggtggtgatctttgggtaacacttacctataagcaggacaatggtaaaccgatgactgacactgctagagtttataaagactttaaagccttttggcgcagatttattgcggcttatggttcgagtgactatcttagcagttctcgaaccgcaggcaagtggtagctggcacttgcactgtttgataaagaagaaagatggtaaatttccttttattgataacaatgaaaccttagagccaatgtggcgacagggatttactaatattaaaaagttgaaagatagcgacaatattgctgcatacttaatggcatatttgaccaacgttccaaaagatgagattattcctggaactaaagataaagcaataataaaaggggcaagacttcatttctatccatctggagttcatatttatcgtacttctcgcggaattaggattcctaaaaagttagaaggctcaaaacaagccatattgaaagaatatgggctatcagttaatgaagttgctgatgcagcattttttcatgagcaccatttttccgacgataggacagccaaatttgtaacagaattttatgacaatgtaggtaataaaaaagaagctagtcacggcaatgaatagcttctcgaattgaacaaatctgctagactgttcaacgtttattatctgctaagtcacagtttttgcaaaggagaaattatgagaactgtaacttataaagacttaatgaagcttggattcaaagaaaatcaagctcatgacatcattagacgtaccaagcaataccttgtacaaaaaggttatggctattataatgggagacgcataggcgttgttcctgcttgggcggtgcatgaaattgtcgctattgatctttagaaaaaagaaagatggtggctgtagtgtcaaacactaagactaagtattctggggtttaccgtgacgcaaaaggaaaatatttttataatatctttttgggtcgagatttaaacggaaaacagaaatttaagaaaggaagaagggatgccttagggcaccccttttcttcagcaagagcagctcacaaagaagctgaacgagtcaaacagctatataaaaatattgatttgaatgatatttcttatgctaaattcatgaaagatcgttttttgccaaagtataaaggcgatgttgaagaatcaacgtacaatacacatggaagaatgtttgctaaagcaattgatttcttaggtgatactaatcttaagaaaataaccgttgctgattgcgaacgatatcgcacatggctattgacggatgcaggttactcacaaagctatgccagtattatttatactgcttttagacaatctttagattatgctgttgagattagcttattaaccaataatccttctctcaagactaaatctattcctaagggaaaagcagttgagaagtactggactaaggaagagtttgaaaaagttataaattgtatttcaactaatagcttttacgaaaatgcaatttatattacttttctattcttttatcggatgggatgcagagtatctgaaggttttgcattgaagtggactgatattgatttagaaaatggtcgtgtgaggatatttcacaatatgcgttatcgtagcaaatttgattatgagattaagccttatactaagactgattctggtaaaaggactttgacaatagatgatgaactactggaattgctaaaagcatggaaagcaagacaagctgaaaacggtgtacatgaatttgtgttgagttttgatgactgtccgcttaataagtctacattaagtagatggcttgaaagatacgctaaaatagctggtgtaccacgaattaatggaagaggattacggcactctaatgctagttatctcattgcagagctgggtgcagatgtattaacagtggctcatcggttaggtcataagtcaccaatggtaaccttaaaatattatgctcacatgtttcctgataatgatgtaacaattgcatcccgtatggagggaagtatgaagcttacaccagctaaagcatcaaagattagttttaatggtaaccagaacataagtggtgacaagattaaaagtttgccaattgtttgccaaaataagaaaaaagcaatgtaaatgttgatataaaaggaacgtatcttattctttgggaataatttcgtaccttaataagaagagggaatcccaatatgacggcatttgaatagggttaatattagtggaaagtaccggttgaaagcaagttgtctaccgtttttctaccggtagaagttgattttaatcagcatgaatagtgcattaaacgctactattacctgttcgttattttggggttgtctaccgaaaattgaatattttgcttacttttgttgaaaagtaagtgactgttgtcctacttattgtcatttgataagtggggcatttttgtttctgctatgaaaaatgtaagcaaatgtatgactatgttctattttcatacattttggactatttgtaccttccatttctcttaccaacgtctacgctagtattccgatatttcaatttagaagtaatcgcattgactagctcttttggcatcttttcggacgtagcctcgcccgcaattatcttataaggctcgatttaactctggatgctttactagcagcgttaggttggccatggcattttcgtcgcgatcaacctttttattgtaattaggacagctaggattataacagacaaactcgttatgcttggtgccatgctttttattgccctgcagcgtgatcttttcatcgccttttttgaccaagccgcatgctgcgcatctttgcgttgatggatatagcttgttggcaataatcagttctttaccataccattcgcatttatatgttaaaagctttctaaacaagccaaacatgcttcgatgcatgccttttgaagccacatggctcataagcatgcctttgactcccagatcttcaatcgctatttgatcgtaattgtttaccagttcagtagtaaatttatgtattaaatccgtttgaatgttttgggcacgctgataggatgcctgaagcttgattctcgtcttcaagtatttcttgctttgcgcacctttaattctaccgttgactgttcgcttctttgccagctctttgttgccacaaaagaaatgctgaaatccaaacggagcagtctgtttgatcgttgttgttacttatgacgaaaacataagtaaatcagatatgaaatctcgaaatgaccttgaatgaaatctcaaggtactcattctcgaatgcaatatctgatcggtcgcaaccgaaggctgaaaatttattttgccgggacggcaaacatgagggggtcattgcacgatgaagccgttaaaggatgagctaattcaaagtcgacttgatgaagatgaattagcagattttgataaagtgaagaaactgctcgatgtgaagagtaattctgttgcaattcggcagatgattaaagatgaaatgagaaagccagaaatgaatggaagcaaggtaatactgacgttgtatcagcgttattaaccaagctgtctgatgaaggtcgcctaccattgtcagaggcgttgatgggtattacaggtactaaaacatcatcacaattgagtatcttacaaaatcagttcgccgatattcaatcacagttagaaagtattatgtattcagtgacaaaaatggtcgattgaacaagtggctcatgtagttagaatcgcctacaagaccatctacaactggattgagcaaggagtattggatattggcgtggctgatttacctgaccatggaattcgccgccgacgagccaaagaaacccgtgggacttttagccatggacgttccattgaagatcgtcccgctgaagttattgaccgtcatacctcaggtcactttgaagcagatacagttttatctggaaagcgtaaaggtcacgcaatagctacgtttgtcgagcgtaagagtcgtcttatcatcgttaaacggcttcagggacgagatagtacctcaataaccaaggccattttagaattagctaaccagttagaagataatctcaagccccttactgttgaccatgggaaagaattcgctaactacaagctaattgaaaagcaggccaggattcccctatactttgcgcatgcttattctccacatgaatggggcagtaatgagaatcgcaaccgagtactacgacgctttatcccaaaggtcaaccgattgagaaaatcactgatgatgagttaattcaaattaactggtatttgaactccaggccactcaaatgtttaaactggcgcacactaattgagatctttttgcgtaatctgcgtcactaactttgttcaagttatttcttgcaatctgccgtttgaaaagagattagccttggcggttagtctcttttactatctggtaagttgactgcaaacagaaaagagagacaagcggtcgtcaaagtcgctaaaccgtgctgtaatgttatcggatttaaaaataccactagttattaaatttgggaggcaagaataacgatgaagcgacttaaatttttagaaactaagcggacaccacgttatagtctgcgtaagcttaacgttggtatggcttcggtattattaggagtaaccatttttggaattaactttacaaatcattctgtaaaggcagcaaccacagaaagcgttgaaaaatccaatagtccagcaaacagtaattcgcaacaaactttagcagctgtattgccaactactgagcaaactaatggtcagcaagcaactagtgcaaaagaagaaggtcaacaaactagtgcaagtaacaatgcaacagctaataattctacagaagctgcgacaaccttacaatctgcaccaaagacgcaaggtagcgctgacactgatattaaatcatcagcagctacagtagatcaaaataacactaatactcagcaagcaactagtgcaacagaaaaagttcgacaaggtagtgcaagtaacaatacaacagctaataattctacagaagctgcgacaacctcacaatctgcaccaaagacgcaaggtagcgctgacactgatattaaatcattagatattagatcattaacagctatatcagcagcgaaattagcaactatgaatttaatgcaaactaatggtattaatggtactgatactgacggaaatgcagcagcgaaattagcaactatgaatttaatgaaagcttctggtactaatactggtagtgacagaagtgcagcagttacagtaaatccagataacattaatactcagccagataaagaaaatcaagaattggccaataagcataatctaacttcttcagataactacagttctaatatctatcaaggtacagatggaaagtattacaagattgtaactatttatggtaatgactacgtttaccatactgctgatattcaagctaatggtgatgatgcgacagctgaagatactaaaaataatatcaatatttctaaagaagatttaggaaatggtaagacccgttggactgttgttttcttccctaataagggattacaaaatgttggcagtaaattaagtgggttaagttctgcaaaatttggtattgctctcactaatgactaccaaatcgttggtaatgttgacatggacgtaattagtgatcataatcaaacattttcaacttatatatataagcccggtagtaatagcgctactgaaactacagtacaaaatccaccagctgaagtgaagttttcgtttaatcctaacacggatgttgatcaaaatactggtttaattaatagtaaaactatgccagcttataacaataaatatttgcaaggcccatactatttcactactgctactgatactggtaaaaagaacttatggcagacttactttaaaaaatggggtctatttagtaaaggatctaataatgcatatgatgggtccccttatctaggtaacgatcatgaacttcattttagtgattttaaaattacaaataaaactggagttgacggtgcaaaagaaggggacctagtcatttatgacaaactgggatatgataagttcaacggtaaacttaattctgatggcgtatttagcagttataactttaaccaagcaatggaatttaagtcacaaggtgtcactagtcaagcacaattttcttcttataaaatttcctttactacgcaacacacagactcttatgaagtaaatttagataaaggtccgaaaaatcaacaattctcaggaatctcagctaatatttattcttatcagaatggccactggaacatgttttctcgcttatatggtgagcagagagcactgagtccagctggtgtagtaaaacaagctaatgaagttgtttctggttggggtgatgccactagagctatgggtcagattaagaaagactatttaaataatgctcaaattaatgttttgcggaataaaattctaaataacattacagaccatgatgctgtaagcaacattattaaggaaggaaattccttaaacgatgctatgaaaaagcttggtaatagtatcggacagtatgattctgatggcagttttgctgatcacaaggaagatacaacaaaggcatctgatcgctataaatacgcaaatccagataaaaaggcagcttatgacaatgcaactgaagtaactaaagctttgattaacaaagatacaggtacctatgcaaatcaagcgacggtagaaaagcttactgaagctgaaaataaggcttggaacgaacttaatgttgtcctagcaaataagatcacaccaactgttccagcaaccaaggaaccagtagcaaataccagcagcttaactgaaactgaaaaagataaagttaagaagaatgtggaagaagctaataagggtaacttcccagatggcacagttgttacagtaggtgctgacggaacagctacagtaacttacccagatggttcaaaggacaccataccaggtgaccaattagttcaaggccaaaagggcgacacaactgatgctggtaacattacgccaactattccaggcgacaaggtaactgttaaggatccaagtcacttaactgatgatgaaaagaatcaagttaagaacaacgttgataatgccaacaaggataagttcccagcaggcactgaagttacagtaggcgatgatggtacagcaacgattaaatacccagatggttcaaaggacaccataccaggtgaccaattagttcaaggccaaaagggcgacacaactgatgctggtaacattacgccaactattccaggtggcaaggttactgttaaagatccaaatcacttaactgataactgatgatgaaaagaatcaagttaagaacaacgtcgataatgctaataagggtagcttcccagcaggcacagttattacagtaggtgatgatggtactactacagtaacctacccagatggttcaaaggatgtcattgctggtactgatttagtcatcgctgctaaaagcgaagatgttcctggaagcaagcatcattcacacaagaatggttcaaactctagtcaagttgatggagttaagggagcttctactgctaatggtagcatcgcaaacgctggtaacaacctaggtgttaagggtgaaagtgataatgcctttgtaggtgttaagggtgaaagtgataatgctattggtaataacaaggctactagcttaaagacattaccacaaacaggcactaaagatacttcaattttgggtgtgcttggtatgcttttagcttcacttggtctattcggatttaagaagaagcgcgataaagaataatttataatagttttttataaattctattggtaaaagtatctagagaaagttaattctcagatttaaaaagacgatcgaaaacttttgaaaaattgtttttgatcgcctttttgtgtgaaatgaaaacaagattctacgtaagcgtaaaataaccgagtatctagattagttttagagtaagcgtcaaaatctaagacgtctataatttgtgctcctcctcatttatacttggctcatcaagttaattgaggaggactttttaatggaagatcaacccattattcctttagctcctaatcaaattaaaaaagctaaagaagaaaataatctactgttcaagtattcaacgccggatattgaacttcacttctataaagatatgaatcaagatcttatcatgaagattttagacaaggtggtcaaagatgataaatctgagtgatcttgggcaagtttatatcgtttgtggaaagactgatatgaggaaaggaattgcttccttaggctacattattaaaagccggtttgaacttgacccattttctggtgaagtattcctcttttgtggaggtaaaaaagacagatttaaagccttatattgggacggtcaaggtttctggctgctttataaacgctttgagagtggaaaactttcatggcctgataatgaagatgaagttcaaaagctatcagctgaacaagttgattggctcatgaagggattttcgattgccccaaaaataaaagatgcaaagccgcgtgaattctattgatttcatgtggctttttcggtatccttttaaaaagcgaatgaggaggagtactgaaatggcagaaattaattatccagaattagttgcccaattaactgaaactaatcgtgaacttactaaacaagttgcacttttaactgagcaagttcaatacttgactaataagatttatgctcgctcctcagaaaagactaactttcaacctggtcaaactaatctttttgatgatgaagacctaggtcaagatgatgatggagactctccctattcccgtaacagaggttaagagctatcatcgtaagaaacacaacgaaaccaaacaagagattattgataatctcccaggtaaacgtgttgatcatgttttagaagataaaaactgtcctgactgtcatcatgaaatgcatgatattgggagttcggtaaagaaagaagtaatcttcaaacctgcagttttagaaagactggatcattatcaacatgcttaccgctgcaactactgtagtgatcataactatagcgataagattattaaagcaccaatgcccaaaacaccattagatagtgcacttggttcagcttcactgatcgctcatacgattcatgacaaattcaagctaaagcttccggcttatcgtcaagaaagtgaattaaagagattaggtcttccaattagtagacagactatgaccaactggcatattaaggtttgtgactactacttgggtaagatttatgacctattacatcaagaactacttgaagagaaggtcattcacgctgatgaaactccgtatcaagtattagaatcagagacagctaagacctattattggactttcctgtctggtcgatactcagataagaagattactacttatcatcatggtagtcgtaaagggattgaagctgttaactttttgcaagatttcgatggcttcgttcactgtgatcagtatggtggctatttccaactgaaagatgtaactttagttggttgctgggctcacgctagaaggaagttttatgaagctcaaccgcaagaatatgatgacacttcaatttctcaaaaggcacttgcctacattaatcaaatctttcacttagacagccaatgggcagaactcacaagtgaagaaagatatgagaaccgaaagaagcaacttaaacctttaatcgagaagttcattaattggtgtcataaaaagcaaagaaatgtcctacgtaactccaaattaggtaaagcattcagctacttcttaagtcacgaagataaatttagaaatgttctgcgaaatggcgatcttgttttgaccaataatatggcagaacgatcaattaaagaacttgtgatgggccgaaacaattggattttctctcaaagttttaaaggagcccaatctgtcgctatcattttaagtataattaagactggagaaagaaacgatcttgatccattgaaatatattcaatatacgcatggtgctagttaaatcgttttagttaataaaaaagtccaatcttgttagactcgacttgtaaatagtaataatagaaaagagtctgatctgattgaactgccttaagcttaagcgttttagccaccatttacaagttagttttaaagatttagtgataatttgtcggcactggtatcgtttgtatgcaccggctgagtttactcatcggcgaaatattgatcaaattaaaactacggacagtctgattttggctttacttatctggcaagctaagacaggaattgaatcacaaagaagattctgtgaatgtttcaattgtttatcacactcacgttttaatcggcgttcacgtcagctattgcaattgatttatcagatacggcaagaaatgaataaaaaggttgacctgaatggacatttcttgatcattgacagctttccggtacctgtttgccaaccaattcgcaactatcgtgctaaaatttttcgcggttatgccaacattggttataaggccaccaagaaaatttacttctatggtttcaaagttcatgtcattgttagcgatgacggttacattcttgattatgtcgtaacaaaagcatcagttcatgatgccagggagacagttgaactgctggaaaatacccatccatctaattactatcttcttggcgacgaaggctatttaggcaaagaactgcatcaacagctaaaacaaatgggttatgaactttggacaccatatcgtaaaaatatgacaggagctaaaaagcacaatgatcatcaattgatggctattcgcagaacaattgaaagcgacttttcgcttctgacctattacaatgccgagaacaatcgagcacgtagtctgataggctttcaaagccggttggaaattgcaattttagcttataatttggcttattgtctagaaagatttaactagcaccacgcgtatagttataatttacaattatcttgggtagaaatcttattgtttagaattaagaaagcttaatattattttttgtggtggtcgatgtaagtcagcaaagccaacaaaagcatcaaaaagctactctcgtaaaccgacatggttgaactctttctgtagtatgttgaccattgttaaaaaaggtgaacgcgtaaaatactaaatttttactctaacaaagtgtctgggaaaaagtttatttttaattaattttagactttcactcaaaaaaatcctaataaatcaaggtttattgataccaagatttattaggatttcttaatttctgagtttttcccagacactttatttagactattttcttaacttgtgcaccttatgggctagaaccatttctttattgcgatcttcatagatcatatccttgatgtaattccatgggattaacaaaggcgttttgctatttttacggaaaatgaagtctgcgtgtcgtctttccaagtgacgcaaatatcttttagcattttgaatcttagtatggtgttccaaatgcaatcgtggttcgaaatcgacgattttatgttcagcgttgaaaataggtctaactttatggtgccagttctcagcactagagatatgatcgctgaccttttttccggcttctacgatattctctttggttgctggacttttctgatccttaaactccgcatgtggatctagatagtagttgcccaaaccatcttgacgataaagtcgtattttcttgaatgtcttatttttcttgtccattcttacttcgataacgtcaccatttttgtgattcattaaatacatgtgatgttttctagtgtaatttgcacttttcatgatcagaaatctcacctctacattaattattctgaaacgatattataccagtattttaactatatttttgctttacgagtataaaagtttataatttttaaaaagaaatttcaattcttgagaattagagaaggaaaaaatcctaatgaaggaacttaatatattttattatgctaccatttggagttttattattggagaaactgtcaaatcttttgtgtaaatagttctttctcgtaaattgattttttaattatttatttaatcaaagtaggattctaaggtgtcctgaacctgaccaaagcctttatgaattcgattgaaataacggtcattgtagctcattgcctgaataccaataaaagcatcaagcgactgttcagttggaaactctgccttaggcttagctttgcgcttgatcacattgttaaatgattcaatcatgttagtcgaataaattgaagctctgatctgcttgggatagttataaaagaccagcagatctggttctatgtctttcaagcttctgataacatggctgtaaaccttgccccatttggtatagaagtcatgcaggacagctgtggcttcttctttgtttgtctgttgatgcacctgtttgaattcgttcatgatcttttcacgatcgtcgacgcgtactttagcgcagatattgcgcatgacatgaaccaaacagcgttgaaaatgagctttaggataagtcctggccaaggctgttttcatgccaacaacaccatcagaaagaaagagttcaacttgcttcaagcctctggacttcatgttttgaagcatctctgtccagacttcaatgttctcactaggagcaatgcagtagtcaatgacttccttatgtccattaggtttaatgccaatggcaatatagactgcttcacgctcaaacgtttctcggcgcaaaggaaggtatgtcgcatccaaatagacgcagaaaaacttgtcgcttagcttgcgtttgtggtaagcctcaacctttggaatcatctgcttggaaatatttgatacctgagctggactgtaatggctgccatacatcttttcaattagatcggctatttccctggtggtcacgcccttggagtaaagcttgataatcatgctttccaagatatccgagtgctgcttgtagtcaggcagcgtgtgctgatgaaattgaccgttgcgatcccgaggcacttgcacttcaattgggccaaattgcgtatcaactttgcggaaataagcaccatttctagagttgccagtattccagccatttctggcatagggatcatagcccagaaaggcagtcaattcagcttctagcaagttattaacagcctgttgtagttctttgcgcaataaatcatttattttgtctggattgaatagagcttgagcaaaatctttggtaaaatcattcatgaaggagttcttctttctgtatgtgttttttttgttcaaaccaatcatacgagaaaggaactcctttttctaatgtttaaagaaataaatttaaggaatcattcatccttacacaaactattttacagtctcttattggaatatgctgtgctacatatttaaacttaattaattttattatctgaaaattgaaagcaccaaaatcaagctcaagtcctgtcactattgagctttcttagacgtaattagtttttatatgatctgtttcagtgcaatttgtatgaatcgtggcagttggttaataaagtcattgattacttcatctatcttttcaaaactattctgtttaagctcttttaattctgaaattaagtagaccaatgcatctacgaatctaatatcaggtaaggattcgttcattagatagaataaatctccgattgtcttatcatctgtattttgtctttcctgccaggtcaatagatcataagttattgctgtaactgcgatatagccacattggccatcatagctttgaacttgagatttatctaaagcaagatattgcttagacgtcttaaaatatgtttcaatttgccatctacgaccataaagttggatgatttcttcagggctaagctttgtctgagtagtagctaaaaccaaatacttgttcttgtttccacggttggagacaaagacgagctttaataaaaagctatgtccatgatattgagcctcaactatgcttgaataaagataatgtttctttttacggatgtttgaagcagcaaaacgatcatacaagtctttaacgctatagcggcgatggcgataaatgtaataaatctttgaactcttcttgatcatgccaagtccatctaaaccgatcttctttaaaatccaaaacattcttggagaagaaaaccaagaatcgaataagacgtatttagcttctactcctaatcgtaaggcttgtctaatcaactctacagttacatcattcatctttctctgagcttgatttctccttttaccagaaattgaacgttcatcagcagtaatgggagcagctccaatcatatttttcttggttttggttgacatcaaggcaaagttaaccggcaagaaggtattgccatcgctccagcctaaagttaaaccacgatatccgttccaatactcatgcttgtcatggtcatagactttagctagcaattcggtctttttagaaaaagaccgagccatcagcgtatcgtcaacgataaaagcaagtcggcgtcttttatcgataaatggttttaagcagccaatgagccgggctgcaatcaagcataatagtttttgccagttgattcttccatcgttaagtacattgcgagcagttctaacggaaaaacgtttgtcatccttagctctgaataaagaaagccgagcaaaatgtactgacatcagccaagagataatcatggttaatgaaacggtggatttacgcttaaaattgacttgtttagttaacttagctagaccaattagattaataaatgaagaaattaaggatttagtatcattttctgtgtcgatttgttctatactgttcattgcgcaggatctcctttactttttaggtcgacacttaaagtataacgcagagagagcctgcgtttttatttttgataagaaaaagccaagaggcgcggggaaggagcgttaatcttagctttcaagtttcagttttattattaattttgtctggcatgttttgtttgataaattacctgttcctagtcaggctttaccgttttttatttgtattccttttggtttcattattggtatattaattaagcgtttaggatcatatccattaactatcgaagaagttttaatgagtgttaagcaggaggaaaagatcaattatcacaattggtggaaatccttaaccttaggtcttatttctttagccgcgggtggcagtattggaccagaggcttcaactactgtactaggaagtggcatggttaattggctgggagatagattacgactaattgcttattcttctgattggaaatggaatcatttttgggatactatcgtttcgaaaaaacaactaaaaaaactgccaaaatttagtagcctttttaaatcaaaattgtatcaaaaagttttttgcttaattatggttatgatcggcgtggttggtgcagcaatagtctttaaattattccctgaagaaggattatttggtattcatcatcgccatattctctggcaatggcgctatagtatgtatgtaattattctattaattgtaggttggagcttcggtatgtttttcttatggagcgaaaaatggagtgattattttgctaaaaaaattactatttcaccgattattaaagcaactatatggggaatagttcttgcattacttaccttaattactagttatgccctgtattctggtgaatttcaaattgttccatttgtacaccaggcgttgcaaatctcaccattatttttgctagttatagcagtcatcaaaaccttgtctactaatataggttttagtttaggctggcgtggtggaaaaattttcccttcgatttttgctagtgtagcagttggcgcagcgattgcgcaatttttaccaattatgccagttatgtgtgtagccattacagttagtgcaagtattgcagttatcttgggtaaacctttattaacagctattttattgattctgttattaccaatagagttggctcctgtcattttagtaagtgcgtatttatctgcctgtttgacaaaagtgagctatagttttagacaaaagaataattagggaggtatttttatgaacgaaaaaaacgatgcagtaactggtgcttctttgatagagaatcaagaagaaaaagtaaaaagcccatggccgggtcctaaaggtatgattcctgtaacaagtgggcgtgctgacgatgctaatgtacataatcgtgcctacttagacaatatcttggtggagatgcgtttgcttgattcagttgagccagacttaacaactgagatttttggtaaaaaatatgcctcacctttaactctggctgcagtctctcatttgaacagggttttaccagataagacgcgtaagccaatgcaagaaaaggcacgtgcggctaagaataccaatactttaaattggattggcatggagtcaaacgaagaatatgccgaaattgtcaaagagggcggcgatacagttagaattgtgaagccttacgcagaccatgataaaattatgggcgaactaaaacaagcagaagaattaggtgccgtagctgttggaatggatattgatcatgtgcctggtgataatggtaaatatgatgtagtcgatggtattccactaggaccgatttcatttagcgatcttgaaaagtatgttcatgcagttaaactgccgtttgtggctaagggcgtgctatccgtgcgtgatgccgttaaggctagagatgctggtgccaaggcaatagttgtttcacatcaccacggccgcgttccatttggcgtgccgccactaaaagttttgccagcaatcaagcaagcactaaatggcagtggaatgaccatttttgtagatggatcattgatgactggctacgatgcatacaaggctttggccttaggcgcagatgctgtactgattggtcgcgggattctttctgaattgttaaaagacgggcaaaaagcaacagaagataagattaagaaaatgaatgagcagcttgcacaaatgatgttatatactggcgttaaagatactaagtcatttgatcctagtgtgttacattttgattaggatagaaaaatgaaatagtttattttttacagtttactataattaagtggctattagcctataataaaggcgtttaaagctatactgaatagtgttatgcttaactcggacgttgttataaggtaattatttaaaagtaattagttgtatacgaaaacatgcttagctatggtaaaagctaagcatgatgtctcataatattgagccgcttgtagattatactacaagcggttttattttagatgaaaataacaagttttcaaaaagtgagtatctatgttttgctattatggaaatggattgatttagaaaatgatgctattgaaatttcattatgagcggggatgcaaaaccttttttaaaaagcataagaatgagcaaaagataattaagcagttaatcgatcaagcgattactaaggaattggcaactggtatgactaaagtgaagatcgctgcaatgactcggattaagggaaaatcaatttacgagtttcgcctaaatttgaaaaaagcgggttcagcgagagtcgcttttgcagtaaaggatgagcaagtactagttcttttgattacctctaatttacagaaggatagttttagtcatgaattagaaactgttctgaaaggaagtcattatgcgtttaattccaattaagcaggcagagactttgctcaaaaaaatgtgtagtaataaaagtaaatatgtagaaattaaattattaacggcaaaaaaggatcgttcaattagtgtgaaaaatgatggtaaaaagctaattttaactgaagatggctatttgaactttacgcaggaatatgaattgactgatccagctgttggccgtcatgcagttttagcggcttttaaaaaggaatttccgcgtagtaatcgtgcatatctgattgctaaatagtatactttaactataagaaaaactatcagtgttgattagaaaggaagtctttttatcaatgaaatatgcagaaaaatctcccgcattatgggatgccattcatcatgaagaacagcgccaacaagacaccatcgaattaattgcctctgaaaatattgtttctgatgcagttcgtgaagcacaaggttctgttttaactaacaagtatgctgaaggatatcctggtcggcgttattacggcggttgtcaatatattgatcaagttgagcaactggctattgattatgcaaaaaaattgtttaacgcaaagtttgctaatgtgcagccacactctggatcacaggctaacatggcagtttatcaagcacttttgaagccaggtgatgtcattttaggtatgggcatggatgctggcggtcacttgactcatggatccaaggttaacttcagtggtaaggaatataagtcttacagttacggcctaaatgttgagactgaagaactagattttgatgccattcgtgaaattgctcttaaggttaaacctaagttaattgtagccggtgcttctgcgtacagccgcatcattgattggcaaaagttccgtgaaattgcagatgaagttggggcatacttaatggttgatatggctcatattgctggcttagtagcaaccggtcaacatccaagtcctgttccagtagctgatgtagtaactacaactacacataagaccttgcgtggccctcgtggtgggatgattttgtccaacaatttagaaattggtaagaaaatcaattccgctttgttcccaggcattcaaggtgggccacttgagcatgtcatcgcaggtaaagcgcaagcattttatgaggacttgcaaccacaatttacagattatattaagcaagtcattaaaaatgctaaggcaatggcagaaacttttgctgaatcggacaatattcgtgtcgtatctggtggtactgataaccatttgatgattatcgatattactaagactggtattaccggtaaagatgctcaaaatttactcgactctgttcacatcactaccaacaaagaatcaattccaggcgatcaacgttcaccatttgttactagtgggttgcggattggtacgccagtaattactagtcgtggctttgatgaagcagatgctaagaagactgcggaaatgattattgaaattttatctgatccagaaaatcccgcaacgattgcccacgttaaagaagaagttcaggcattaactaaaaaacatccaattgaataatttgtgtagcagaatttagccgtcctagttctcagctggggcggcttttgttataataaaaaattaaaaataatggagttaagagtgaaggaaacgtgattatttggaaaagttaaaaagacataaaataggcttattttcagcgattatgctggccttgaattctttaattggttcgggctggctttttggttcaggttctgcagcacaaattgcaggtccagccgcaattttatcttggattttaggtgcagtaattatcatctcaattgcattgacttatgtagaattaggttcgatgtttcccgaaagtggcgggatgagtcgatacgctcaatatagtcatgggccgttattgggctttgtggctgcttgggctaactggatttcactagtcacattggtaccgatggaagccgtagctgccgtgcaatatatgagttcttggccctggagctgggctaactggactaaaaattttattaaaaacggcagtattacttttgctggcttaggtgtggttattatttttatgctgatttttacaatgatcaattttgggtcagttaaaatcatgacccattttaccaatttgatttctatttttaagatcttattgcctactttgacgattacagttttaattgcttcaggttttcatggacaaaactttggcagtaatttacatgaatttatgccttatggtagtcggtccatttttgaagcaacttctgtttcaggaattattatgtcttatgatgcctttcagacggtcatcaatatgggtggggaattgaaaaatccgcgtaagaatattgtgcgtggggtattgatctcaatgttaattactgcggcaatctacattatgttgcaagtgacgtttattggtgcagttgagccaggcatgttagctaaagtaggctggcatgggatcaactttacctcaccatttgcggacattgctattattttaggcattaattggctagtgattttgctctacctagatgcatttgtttcaccatttgggacaggggtagcatttgtagctacggcctcaagagccctagcggcaatgacacacacacgtcatttgccaaaatggttaggtagattgaatcaaaaatacttaataccacgttatgcgatgattgctgactttgttttggcggttattttagtaagcttatttagaaactggaatttactagcaacagtaatcacggcctcaactttgattgcatatttgactggtccagttacggtaatgactctaagaaagaaaagaccagatcttgatcgtccatttaatcctggttatatgaagtggctagctccagttacctttatactaactagtttggcaatttactggtcaatgtggccaacgactattcaggtgataattgttattgccttgggtttgccgatttatttttattatgaaattcactaccaacattcaaatttaaaagaacaattacatagtagttggtggatgatcggttatttgatttttatgtcacttatgtcctttgtgggcagtagcggttttggtggtcagaactggattaagtatccatttgactttgtagtaattatcattatttctctcgccttctattattggggaattaagacagggttaaagaaaatcgatccttatgctgaaaaaattgcgcaaaataaagaataagtaaaaaaactgttgggatttttagtctcaacagttttttgttcgctattctgcttcatcaagatacttatttagcaccttgaaaacaccgttgtcgttattagtaggtgcaataaatttagcagtctttttaacgatatcttgaccattagccatggcataacttaaaccagcaaatttcaacatttcaaggtcattttcaccatcaccgaaggcaattaattcacttcttggcacgtctaaataagctaaaaattcctttagccctgcggctttatttacaccttcaggaataatatccatgtagctccaaccactagttgtgacgtggattttttctgtactacggctgttgaagccatgttctaattcatgtcgaatcttgctgggatagtccattgtgatcttagtgtattggtcatcagcaggaattttattaaaatcatcaatttcgatgctattaggataaaaataatgatgggaccgcttgtattctggtggtgtactttttaaaaagtaggagtgcttaacgccactaattaaaatgttttgggctgcaccaggatagcgtgcgtgcaaatattcaataaaatttaggatgcatttttttgaaaagcttgttgtacgaataatttttccatcgcgaactaagaccgcaccattgtcggcaacaaagtcaatagaatcgataaattcgctaaagtcatcagccaaacgaccagctgggcggccgctagcaataataaaatgtgccccgtgttgatgcagacgagttaaaatctcgctaaacatttgatgatcgtattgtttttcatcgttaacaaaagtaccgtcaacgtctacagcaacggccttaaagggaagagtagtcatctaattacctcactaaaatttgataccgttaacagtttaccatttcttgcaagtgcttacataaattatttatattatgtttaacaataaatttgaaatttacgaggtagaaaaaatgacaccatggtggaaaaaagcagttgtttatcaaatttatcctaagtcatttcaggacagcaacggtgatggcataggtgacttacaaggaattattgctcgtttagattatttggaaaatctaggagttgatgcaatttggctttcaccggtctatcaatctcccggtgtggataatggctatgatatttcaaattatgaagcgattgatccgcaatatggcacgatggctgatatggatgagttgattcagaaagctaaggagcatcatatccgaattgtaatggatctggtggttaatcatacatctgaccagcatcaatggtttgtggaggcacgaaaaagtaaggataatccttaccgagactattatatttggcgtgatcctgttgatggacatgagcccaatagtttgaagtctgctttttctggttcagcttggaaatttgatgagcaaacaggacaatattatttacacttctttgcggaacaacaacctgatttaaattggaaaaatccagagttgcggcaaaaaatctacgatatgatgaacttttggcttgataaggggatcggtggcttccgaatggatgtgattgaattaattggtaaagatcccgacaaaatgatccgtgaaaatggtccgatgcttcatctatatttgcaagaaatgaacaagaatacatttggtgatcgagatgtgatgacggtgggcgaaacttggaatgcgacaccgaagattgcagaagagtactcagatccagcacgtcatgaattatcaatggttttccaatttgagaatcaagctttagaccagcaggaaggaaaagaaaagtgggatttaaagccgctagacttaggcgaattgaaaaaggttttagtaaagtggcagacagagcttgattttaatcatgcttggaatagtttgttctgggaaaatcatgatattccgcgcgtaatttcacgttggggcaatgataaaaaatatcgggtgcagtgtgctaagatgtttgcgacagttttacatttgatgcacggcacaccatatatttttaacggtgaagaaattggtatgactaattgtccggtaaaaaatattgatgaagtagaagatattgaaagtgtcaatatgtatcatgaacgtctggctgaaggttatgacaaagataaactaattcatgcgatcaatgttaaaggcagggataatgctcgtcgtccaatgcaatggaatgatgagaaaaatgccggctttactaagtcaaagccatggttgacagtaaatcctaactacaaagaaattaatgtgaagaaggccttggctgatcctaattcgattttttatacttaccaagaattgattactttacgtcatgaaaatgagattgtggttaatggtgactttaagttggttcatgatactggtgatgaagttcttgcatattatcgtattttaggtactgaaaagtggttggtggttgctaacctatctggtgaagagcaacagtttacgtcgaccgatcgcattaaagaaaacttgcttagtaattatgctgtgcgtaatgatctgcatgatattacgcttaagccttatgaagcatttgcagtggcaattaaataagctaaaattaaaaagaacttgaattactaacttgaagatgttattctagttatcgttaatcgattaatctatgatctgtgatatgatcatggcaaaggagtaataaattatgaaacaaggtattcatccagaatttcaagaagtagttttcatggactcagcaactggtgctaagttcttagctggctcaactttgaagccatcagaaactattgactacgaaggcgaaacttacccattagtacgtgttgaagtttcatcagattcacacccattctacactggcaagcaaaagtttgctcaagcagatggtcgaatcgaaaagttcaacaagaagtacggtttgaagaagtaaaccttttatctggtggaagcagtcccattggggctgcttttttcgttagagattatttggcagaatgcatgaaagacagtataatgttttctgtataaaaatgtttttatgggagtaaatattcaatgaaaatgcaaatggcggaaattgccaaggctttaaatactacttgtgaaggtgacaatcaaactgttattacttctgttgcctttgactccagaaagatcacagatggtggattatttgtaccacttgaaggtgaacgtgatgggcacgaattcatagctagtgctattaataatggtgcttctgctactttatggaaaaaggggcatccgaacaagtcagaagatattgcggttattgaagttgatgatccacttgctgctatgcaagagcttgctcgctattatttgcgtaaggttaatccaaccgtagtgggaattactggttcaaatggtaagactactaccaaggatatgattgctgctgttttgtctaaacgctttaatgtacataaaactcaggccaactttaacaatgagattggtgtgccaatgaccattcttgagatgaagccaaatactgaaattttggtgcttgaaatgggaatggacagaccaggtcaattgcatcatttaagtgaattaacccatccagatgtggccgtaattacaatgattggtgaagctcatattgaattctttggcagccgcgacaagattgcagatgctaagatggaaattactgactttttgcgtgaagatggcgaatttatcttcaatggggatgaaccattattgcaagaacgtgctgagaaattggatcaagctaaagcaacttttggttttagagatgaagatacagttcatgcaactggctttaagagttatatgcatcatgctacctttacagttaatgattcagagcaaaaattctcaatcccaatgattggtaaacacaatgtttctaacgcaatggccgcaattagtgttggtcgtcattttggtgaaagtgatgaggaaattgcctcatcattgtctaactttaccccaacggctaatcggatggagtgggaaaaaggcgatgctggcgaaagcatcatgagtgatatctataactcaaatccaactgctgttagagctgtattgactagttttggccaagttgaagtaaaagatggtggtcgtagaattgctgttttaggtgatatgcttgaattaggtaaaaagtcgccggaattgcatgctggtcttgcagatacaatggatccccagattattaacgaagtttacttatatggctctgaaatgaagaatttatatgatgctttacaaggcaaatatgagccagaacatttgcattattatacacaagaacaaacagatcgaatgattgatgatctgaagaacgatattaagtcggatgacattgtagtattgaaaggttcgcatggaatgcacctagaaaatgtcttagcccgactgagataggagaaaaatttttttgaaattttcagaattaggattaaatgatgcgcttcttaaagcgattaaacgttcaggctttgaagaagcaactccaatccaagaacaaactattccccttgctttgcaaggcaaagatgtaattggtcaggcccagactggtaccggtaagacagctgcgtttggcttgccaattttacagatgatcgacaaaaaagaaaaagcaattcaagcggttattattgaaccaacgcgtgaacttgctattcagacgcaagaagaattattccgtttaggtcgtgacgaacatgctcatgttcaagtggtctatggtggagctgatatcggtcgtcaaattcgctcattgaaacaccatgtaccatcaattttagttggtacgccagggcgtttgcttgaccacttgaaacgcaaaactattaatttagatcaagttaaggctgtcgttctagatgaagcagatgaaatgctcgatatgggttttattcaagatatcgaaagtattttgaaatatgctaagaaccgacaacagacattactctttagtgctacaatgcctaagccaattttgcggataggcgaaaaatttatggatcacccagaaattgtccgcattaaagctaaggaattaactgctgatttgattgaacaatattttgttcgtgctaaagagtctgaaaaatttgatattatgtgtcgactaattgacgtgcagggtccagatttggctttagtctttggtcgcaccaaacgtcgcgtagatgaacttacgcgcggtttgcaagcgcgtggctacaatgcggcggaaattcacggtgatctatcgcaagcgcgtagaatgtcagttttgaaaagatttcgtgaaggtaagctagatattctggttgctactgatgtagctgcccgcggacttgatatttcaggcgtaacccacgtttataattatgatattccccaagatccggattcatatgttcaccgtattggtagaactggtcgtgcggggcaaaatggaatctctgttacttttgttacgccaaacgagattggctatatgagaaccattgagcaattgactaaaaagaagatgtcgccgcttcgtccgccaacagatgatcaggcattacatggtcaattaaagcaagcaaaaattgaaattgaagatttgatgaacggtgatttgggtaaatatacccaaggggcaagtgagctgctggataactattcagctctcgacttagttgcagcctttttaaagaacttggctaaagatgaggttaaagtcaagattaccccagaaaagccgttaccatacaagggtgatggtcgccgccgtcgtggtaaaggtcatggccgtagcaataataatcatggacgcgataaccaccgccgtcgtagtaacaataattcataccgccaaaatggaaaccgcggtaagcgtggtcgtggcaacggacatgaatttgtaatcaagaataagaaagattaggattttatcttaaaaagggaagttgtaatttttacagcttcttttttgtattataatgatgtcattgtgtgaggtgaaaataatgattaaaggagtaggaattgactcgattgaagttgaacgagttaagaagatcgtggacaagggggatgcttttgccaaaaaagtattaactcccaaagaatttgatcaatatcaaaaaatggcaggcaaacgtaaagttgaatacctaggcggacgcttttcattaaaggaatctttttctaaagcaatgagaacgggtctgggaaagtatattggttttcaagatgtcgaaactttatgggatgatttaggtcatcccgttatgacttcaactaagtttgatggaaatattttcccaagtatcacacatgataatcatgaaattattacatttgtagttttggaggaaaaataaaaatatggttccaggctatcaccgtccagccgttgtaaaggtaaatttgggcgcaattagaagaaatataaaaaacgaaatgaaacatcttgcaacagggcaaaagatgttagctgtagttaaggccaatgcttatggtcatggtgcagttgaggtggctaaaattgcgattgaggaaggtgcagcaggcctttgtgtagctattttagatgaggccttgcaattgcgtcatgctgacattgttaagccaattttagttttgggagtagtttctccagaatacgctccaattgcggccgcaaacaatgtttcattaacgattcctaaccttgaatggctaaaggaagcagaaaagtaccttgaaaaagagcagttacagttgaaagttcatattggagtagattcaggcatgggtcggatcggctttaacgaagatgaggattttattgctgctaataaattcttacaaaataacgataatttctacgtagagggtatgttcgcacactttgcttccgcagacagtgctgatgatacttactttaagcatcaggtagaaaaatttgctcatatgagaagtttgttgacagttaagcctaagtggattcacgtagacaataccgctgccagcatctttaacaaggatgtgcctagtgattgtgttcgttttggaattggcatttatggtttgaacccatcctctaatcctgatagtcctgacttgaagtcatcaatttcgcttgaaccagcattatcatttgagagtgaactaactcatgtaaaaactattcatgaaggtgacggagtaggatatggttctacctttgtagctgatcaagatacaattattggaactgtgcctgttggctatgctgatggctttattagaaagtttcaaggctttaaagttaaagttggagacgaatactgtccaattgtcggccgaatttgtatggatcaatttatggtcaaaatgccaaagaaaatgccgttaggaactaaggtagtcatcatttccaatgatccaacagcgccaaataatattaaggccgccgcagattatgttgatactattcactatgaagtagcatgtttgttaaacgatcgtttacctcgtgtttactatgaaaaataagttaggcaataaaaaagtgtctgggaaaaaactagcttccagatgaataaaaacgatcaagatttccttttttaagaatcttgatcgtttttttgttctctttaaaatttttaacaataaaaatcggcccttcagccaccttctttgacaatatttgttcaaattcatcatcataaaggcaattccgatatcggtttcgaccttctctttacctcgcaggtgcgttctgcgcatgccaaatacgttcttcaaatgtccgaaaactggctctacatcatattttctcatgccatagatgtgtctgccttcttcgctttggagaacttcttttgctttttcttttaaatattgccagttaggattatagcgaacttggcgctggcggccgctagctgttttagccaattgttccaattctggcgttagctggaactcgtctgcctcataaaccttaaaatcacggacctgaccagtagaacgatccttacgctggctgtaatatttgaaattgaatctgacgccatgatgatcaatgtaataatcatctttttcattgtagtaccagttgattagcttagttggatcattcttatactttctggtctgttctttttcatacatagtgtagggaataaagtacttcttgtctggatatttttcctccagcatcgaataattgtattcactgccatagccagcatcggcgacgattttgtcaaacttgtccaacacggtcatttgatccaaaaccggctccaaagttttgaaatctgtcggattaggaaagatggcataatcaactacatattgatcggtcgtgactgcttgaatattgtagccaggctttaattgaccatttttcatgtggtcttccttcatatgcataaaggtggcgtcatgatctgttttggaataactgttgcgtccggcaaagatctcttcggcttcttcatatttttgcattcttggcacataatcttttcttagccggtgcagaatcttttttagtccacgtcgcttggcttttcgaggtgaaccgccaggaatggctttgttttcctgctcaatctctttagtcagcttgttaatttctgcttcagtttcttgagctaattcctttagcccctgactagtttgaactttttctttttccatttctttgactacttctttagtaatcaattcatcataaagttcaactgcctggcctttcagcttttcatgatacttttcaaccgctttgcgccagacaaatgtatagcggttagcatcagcttcaatcttagtaccatcgataaaagcagcaccttcattgattaagccttcatcttctaacaggttagtgaagtagataaagctctttttaatcagttcattggcatggctgcttgatctaaaattattgatagtatgatatgaaatcttttgctggtcagccaagatcatcattggcagattttcttccagcatcaactcaatctttctgccagaaaaaactcttctggagtaagcaaaaagcagtattttgagcatcatggctggatgataggctgggcggcccgttttagcagtcttgcctactaaaacatcttctggaattgaatctacaaaccagctgatgacattagccaaatgattggccggaatggcaaaatctagattaagtgttaaagcagtttgacctgtgatataatttttgtacatgttagtttccacctttttgtttttattttgtgatgatttaataatatcaaggctggagctaaaagtatacaaaaagagcgttgaaacaaaaattcaacgttcttttttcatgatctgagacttagttttttcccagacactttttggtagatcagttttttaatccttaacagggtgttcaataaagacacctggattttcatcactcataatagtcatgccggcttgcaaatcttcgatttcagaaactacgaaaccttttctttgtaacttatcaacaatcgttctcatggtaatatctgagacaccagcggggagagtaaagagtgttcttctaacaaaattaccttcgagttcgccagcagctgcatcaagtgtcattacactagacatattagtgtgcttagacacaatcttggacatcttgatcaagttaccacgtgtattgtcagataaaacggtcaaaacgtatgaaccatttttaacatcccacgcatctgacaacatatcaagcattcttgagtgagtaagaataccataaaaatgattatcttcatcaaggacagcaatataaggcaagtccttaatgttgaaaaataccttgaagaatggtgaattgaccttaattgtcttagtggcattcttaagtaagtaagttactggtagattcatatcgccaccttgtgacttatgacggtagatatgcatcttataaatgttaccacggaaaatagtaccagtatcgtcaacgattggcacacatctgtagcctgaatcttctaaaacttttaaagcttctgctaatgtggctttttcattaactgttgttaaataatcttttttaataactaaagatttaataagcatgagttcgcctccgaaagtgagaaatgtttcaagtaattatagcatagttgatgagttaattaaatattaattaaagttcatctgaagtaacaactatattttaacaatagttagacaaataaaaaagcatctccgaaaaaagagatgcttttaagtgaaacaagttttagattattgacgaaccttaacgccagtttccttaaatgccttgtccataaccttcttcaattgatctgcagaagcagtcatcaattcttgttccttgtcacttaatggcatttcaatgatttgttcaagacccttacggccaacaactgcaggagtaccaatgtgaatgtcatgtaagccatattgaccgtccataggaactgaaagtggaagtacacggtgttcatcgttcaagatagccttagcgatcattgctgaagcagtaccgattccgtagaaagtagcacccttcttgttaattatttcgtaagccatgttagcaacttccttgtggatgtcttcaagcttagattcatccataccgtgagccttaacccagtcactaacctttacgccaccaacattgttgtagctccatgctgggaattcagtatcaccgtgttcaccaagcatgtaagcattaactgaacgtgggtcaacatgttccatttcaccgataaccttttgaagacgaccagtatcaagtgaagtacctgaaccgataacacgatccttagggaaacctgacattttccaagttgcgtgggttaaaatatcaactgggttagcaacaactaagaaaataccttcaaagcctgattcaacaactggttcaacgattgatgataaaatcttcaagttcttgttaacaaggtcaagacgagtttcgcctggcttttgtggagcaccagcagtgataactactaagtctgcatccttacagtcagggtagtcagctgcatagatattctttggtgaagtccaaggggtagcatcagctaagtcaattgcgtcaccttcaacgtgttccttagcgatatcaataatacccaattcttcggcgataccttgttgtaccattgagaatgcgaaggttgaacctacagcaccatcaccaacaagaataactttacgaggtctttcatctcttggcataaataaaaatctccttttttattagtgatatttttaacaaaatgaattataccatgatagcaagcattaataaaattattatttcctaattgtgctattatatgtaagattgtgtgcatagtgaggagtaaaaataatgaagataattgcaggtttaggtaatccaggacaaaaatatgataaaacaaagcataatactggtttcatgacaatggatcattatttgaatgaaaagggtttgtcactggataaagataaatttgaaggtcattggactaagcaaaaaataaatggtgaagatgtaattttgcttgagccgcaaacctttatgaatgaatcaggtcgttcagttagtcaagtggctaacttctttaaggttgatccagcagatgtgctaattattcaagatgatatggatatgccaattggtaaaattagaattagagctaatggcaaatctggtggacataatggaattaaaagcatcattcgagatttagggacggaaaagtttaatcgtttgaagattggtattcgtcatccgaaaaatgcaacggttgtttcatgggttttgacaccatttaatgatgaacaacaaaaattgatggatgatgcatttgcgataagtgtagatattattgacgactttatcagcggacatggtagtcaatatttaatgaataaatataattaaaatgcgtttaacagagattttagataaagatcaagatttaaataattttatttcaaaaacaaaacaagtaaaaaattcactaatcactggcgctaatgccggtgcttttagtctattgctaaaacagataacaactaaattagcagctccacttattttaattgaagaaaacgaaagtaaagcacaaaacttatatggtgaactcagtgccattatggcagatgaaactgtgcaaatttttccagtagatgctacaattgcaacgcaaacggcagttagttcgcctgatgaactgagcagccgaattcaggcacttaattttttgttaagtggtaaggcaggaatagtggtaacaacgccgcaggggctgcaatacaaactgaccaatccaactgattttgcgcaggcaaagcggagttttgagccaggtcaagaatatgaactaaaagaactcaatgaatggttgcttgcttcagggtatcagcgtgattctttggtagcacggccaggcgaattcgccatccgtggtgatattttagatgtttatccactagatcgagaaaatcccgtgcgaatcgaattctttggtgacgaaatagatacaattaaggaattcgatttagctagtcaacggagtcaaaaagagttagacaaagtagaagttgcagcagctcaagatcgagtttttactaaggatgcaattgcggcagcggctaagaaaattgaacaagatatggccagtgcaccagctcccgctaaagctgtcaaggaccactttgcggcagttcttgatgaattaaacgatggcggtttacctaaaaactatgctttcttaattgactatttgcttgaaatttctagtagtttactcgaatatttgcctaaaaatgggcagattttatttgacgatttgcctttaattaatcaagcggttgaaacagttgataagcaaaacgctgcttttattaatgatgaactaaaaactggtgcaatgttgccagggcaaagcttgcggtcagattatacaaagattctgagcaaagataagcaccatcgtatttatttctcattgtttcaacgaagcatgggacgactgcgcttaggccagatgctcaattggtcaacacgtgagccagaacaattctttagtcaaatgccgctgattaagtcagaattagaatcttatcaaaaggcggggcaaaccgtcattttacaggctgataatgaaaaaagagcacagcaaattgatcaaacaatggttgattttggcttaaatttaccaattgttggtgcagacgaaattgttgaacaacggacacaaattgtagttgatggctttgttagtggctttagtttaccaacagttaaattggtatatctaacggagcgtgaactatttaataagcgcccacaacgtaaaaaaagaattaagacactggagaatgcccagcgtttgcgcaattatactgaactgaagccaggggattatgttgttcatgttaaccacgggattggtcggtttgaaggaatcaagactttagaaaataatggtaccaagcgtgactatattacgattacctaccagcatggtgatcagctttttgtaccagcagatcaattaagcttagtacaaaaatacgttggttcagaaggtaagacaccacatattaataagctaggtggtagtgagtgggctaaaaccaagcgtaaggttcaatctaaagttgaagatattgcggatgatttgattgaactttatgccaaacgtgaatcagaaaaaggctttgctttttcacctgatgatgatctacaaaaacaatttgaagatgcctttccttatccagaaacacctgatcaattgcgatcggttaaagaaattaagcaagatatggaaagctcgaagccaatggaccgtcttttagtaggggatgttggttttggaaaaactgaggtagccttacgagcagcttttaaggcaattcaggataataaacaagtagcctttttagtacccaccactattttggcgcaacaacactatgagacgattcaagatcgcttcaaagatttcccagtcaatactgctatgctatctcgttttcaaacgccagttgaatcaaaggaaattattgaaggactaaaaaatggcaagatagatttggttgttgggactcaccgtattttgtctcaagatgtaaaattcaagaatctaggattgttaattgttgacgaggagcagcggtttggcgttaagcacaaggaaaagttaaagcagttgaaggcaaatattgatgttttgacattaacagctacgccaataccgcgaacgcttcatatgtcaatggtaggtgtgcgtgatctctcagtaatggaaacgccacctcaaaacagataccctattcaaacttatgtgatggaacaaattcctagtgtagtaagggatgcatgcttgcgtgaaatgcaacgtgatggacaggtcttttatttacataatcggattagtgatatcgatgaaactgtcgaaaaactgcaggaattgatgccacaggcgcgaattgcagctgcccatggtcgaatgagtcagaatcagttggaagatattctttatcgcttcctgaatcgcgagtttgatatcttggttacgactacgattattgaaacaggaattgatatgcccaatgtcaatacaatgatcattgaagatgctgaccactatggtctaagtcagttgtatcaattgcggggtagaattggccgtagtgctcgtttggcttatgcttacttcttgtataagccaaataaagttttaactgaggttggtgaaaaacggcttgatgcgatccgtgacttcactgaactgggttctggtttcaaaatagcaatgcgtgacttatcaattcgtggtgctggaaatatgctgggtgcacaacagcacggctttattgatagcgttggttatgatttgtactcacaaatgctggctgatgcaattcaagaccgtaaggggaagacaacagtcaaaaagtcaaacgcagaaatcgaccttggacttgaggcttatattccagattcgtatatcggtgatcaagaagaaaaaattgaattttacaaaaagattaaagccgtctcaagtcaggaagaattaggtaaaattgaagatgaattaatcgatcgttttggtgactatccaacggccgtcgagaatttattagctgttgccggtctaaaggttgatgctgacatggctcaagtgctcaatgtggttaaaactgacgataagattaaagtggaatttacgaatgcagcttcacgcgaacttgagggacctaatatttttaaggcattggagcatgtaagcttaaaggctcgcattagtatgaatcaagaaaaaagaatggttgtcttgctattgttgccggataaaatgaagaatcgtgttttattcaatgaactggcaatctttttacaggcagcaagcgacattgtacaaaggtaactgtaggagaaaaatatgaggattgataaatttttaaaagtttcacgattagttaagagaagaaccgtagctaaagaaatggctgatcaaggtagaatcaaagtcaatggtcgagttgtaaaatcaagctacgatgtaaaaattgatgatattattgaagtaggttacggcgccaaaaccatcaaggctaaggtgttaaatattcgcgagaccacgaaaaaagcagaagcaagtgaactgtacgagctagttgattaatgacttttgattaaatcgttgttatacttgacttagtatagttatttagtaattaggggattaaacaatgaatcatggtccacgtatatataattcgttgagtccagaagagcagagggcgcgtcttagacgtaaacaggctaaattagagaaagaaacacaccgcaagcggttgaacgtaattatggcagtttttgctatcattttcgttgctttaggtgtacagattgcaatcaagatttctcaaactggacgactgaataatcaagtacaagctgaaaaacagactttaactaaagtaaaaaataagagaaatgacttagaaactgaaaagcaggatttgaaggatccaaattatgttgctaagctgattcgttataaattctattattctaaatcaaatgagaagatttataacgtgcatgaaagaaatgatgataactaatggaaaagtatcaagctggtaatcgggtgactggtgtaattaataacattactgacttgggcatctttgttactttacctaatcggcattctggtttggttcatcatagtgactttggcaataattggctacgcgaacgtcgtcgttatcatgctggcgatgaagtgcgcgtggttgtggtgcacatccataaagggagatttaatttatcgatcactcgagtgaatgatccggaattagttgaccatgataatcaattttctaagacaaagccagctgattttgatcaagtcctgaatcaaacaacgcgggatgctaaagaagaaattgaaaagctaaagcaagtattaactgagaattaagagatggtccgaaagggccattttttgttagaaaaataatgaaaattaatgatttttttgaacaacatcagattgacttaaaggataaaagactattagtagccgcaagtgcgggaccggattccatggctttactagatatgctagttaatttgcaaaaacaactaagttttactgtttttgcggcacattttgatcatcaattgcgtgcggatagctcatatgaagtagaagttttgcaaaattattgtgctcaaaagaagatttgcctgtttaatggcaagtgggataaacatgatcagccccaaacgggaattgaggcagcggcgcgagaggcacgatatcattttttgactaatgttgctcatagcgagcgaatgaactatttattaactgcgcatcatggtgatgatttgctagaaaatattttgctcaaatttattcgctcgggaaatcctgaagagatgaatagtttgcaagatatcggctctatgcatggcgttgttttgcttagaccactattagcctatagtaagcaagaattactcgaatatgatcaagagcgtgaaattgactatgtaatagattcaactaatacggaggatgagactgttcgaaatcgactgcgtcatcatgtggtgccattattaaaagaggagaatcctaatttaattagtaatgcactgcgttttagtgaaaaaatgagtcaattgacggatttggcggatgagcagttgaatagtatgagaacggttgagccatttttgggtgcttggcgaattaaaacggacaacttaaatgatttatctacagaagaaaaaaatattttttggcaaaagataatctggcaaaaatatcatcgccgggtaaatgaaaatttgggcaattttgaggtgattgattatcaaggttatagttatttagttgaaaataagccacagaaaattgtgcagccatttagtatcgaactaaatcagcaatttgaattcaacggagcttattatttactaactactgataggcaagctgatttgaaagaaataggaagcttttggctggaaagggatgcacattttactgcgggaagtctagtacctgctagcaaattattgttgaaaaatggtcaacgagttaaggcgaaaaagaaattttcagaaaaggcaattccctttgccttgcgctcttgctgcattacaatttatgctgaaaatgaacctgtttttgtagaaaaatgttatcaaaaacaggactttatcacagatggtaaacattatttcctatacatttattaagaagtcttcaaaataggtgaaaatgttagtggttgcaagctaatttgtgatagaattttaaacgtataacttaaagactttgcggaggttttttatgaagaataaccggaatcggctactttcaaacggccttttctatatagttgtgttccttctgctcctatggggaatcaactgggcactcggcggctctaacaatagtggtagctcagagaatatcagttactcacaatttgttaaagatttgcgtcaaggcaaagttaaaaactttagtgttcaacctgctaatggtgtttacactgtttcaggtagttacaagactgcacaaacaacaaagaatcaatcaaataatagttttgatttctttagtaataattcaagtagaaaagtttcgcgcttctctactaccatgttacagaatgattctaccgtttctaacgtgcaaaacttggcacaaaaaagtaatgctcggatgacaactcaaggagaatcacaatctggcaattggatttcgaccattgtcatgcttgtgccaaccgttttgtttatcgtcatgctttggatgatgatgaaccaaggtggcgctggacgtggtggtggcggcggaataatgaatttcggtcgttcacacgtcaagccagaagatccttctaagaataaggttcgtttctctgacgtagccggtgaagaagaagaaaaacaagaattagtcgaagtagttgaatttttgaaagatccatctaagtacactaagttgggtgcaagaatcccatctggtgttttacttgagggtcctcccggtactggtaagactttgcttgctcgtgctgtagctggtgaagctaacgtgccattttattcaatctcaggttcagacttcgttgaaatgtttgtcggtgttggtgctagtcgtgtacgtgacctgtttaacaatgccaagaaaaatgcaccaagtattatctttatcgatgaaattgatgccattggtcgtcgtcgtggcaatggcaccggcggtggtaatgatgaacgtgaacagactttgaaccaattattggttgaaatggatggttttgaaggcgatgaaggtgttattgtcattgctgctactaaccgttcagacgtcttagacccagctttgcttcgtcctggtcgttttgaccgtaaggtattggtaggtcgtcctgacgttcgtggtcgtgaagctattttaaaggttcacgctaagaacaagccgcttgcacctgatgttgatttgaaggaagttgcccgtcaaactcctggctttgtaggtgcagatttggctaacgtcttgaatgaagccgcattagttgctgctcgtcgtaatggtactgagattactgcatcagatattgatgaagccgaagaccgtgtgattgccggtccagctaagaaggatcgtttgatttctgaaaaagaaagaagacgtgttgctttccacgaagctggtcactcaatctgtggtttggtcttaagcgactcacgtactgtacgtaaagttactatcgtacctcgtggccgtgctggtggttataacatcatgttgcctaaagatgatcaattcattttgactaaaaagcaattatttgaacaaattgttggtttgatgggtggtcgtgcaggtgaagaagcaaccattggtgataagtcaactggtgcttctaacgactttgaacaagctactcaaattgcgcatagcatggtagttaactatggtatgaccgaatccttaggtatggttgagcttgaaaaggaaggcgaaagcaatccttacggctttaagccatatagtgaagcaacttcagctaaaattgatgaagctgtaaagaagattttggatgaagctcatgctaaggcccttgagatcgttaaggacaacaaagaaaagcatagaatcattgccgaagctttgctcaagtatgaaaccttgaatgaaaagcaaattatggccttgtataagactggtaagatgcctgaaaaagacgaagatgaatatccgagtgaatcaaaggcttcaacttatgaagaagctaaggctgctgcagagaagcgcgaagttgaaaaggcagaaaaaaaggattcagatcaagcattagctgatcaagaaaaagataccttggagactccatctgaaaagaatcatgaagttgaagaaaataatcctgagaatcccgaaaaggatcaatcagaaaatgaaacttcaactcaagatactcctgcagatgatgagcataaagacaattaaataaaagtagggcctgtcacaggctctatttttttagaaaagaaggataaaaatgagtgattatttagtaaagtcaattgataagactaaaaacttacgcttgttaaccattaccgctaagggtgtagtgagtgaagcacaaaagcggcatgacttgtggtcagcttcagctgctgtgcttggtcgtactttagtaggatctcttttacttgctggtgcagaattgacagataaggaagaattgacagtccgtttattaggcaatggccctgttggtccaaccatcgtgacagctacctccgatttgaaggtaaagggttatgttaagaatccacatattgctttaccacctaagaaaaatggtcatattgatgtgaaaaaagctgttggacaaggatggtttgaagtaactaaggaccttggcttgaaggaaccatacacaggtcaggtaccaattgtttctggtgaaattgctgaagattttgcttactatttgactaagtcagaacaaattccgtcagctgttggtttgtcagtatttgttaatccaaataattcaatcggtgaagctggtggctttatgttgcaagcacttcctggtgctagtgatgctttgatcgatgaaacgattaagcgaattgatgcattgccagcactctcaacttcatttttggatggaatgacaccagaagacttagcacgtaaaatcttaggaaccgattgtaagattcttgaaaaagatgatgtagcctttaactgtgattgttctaaagaaaagtatgctggtattttggaaactttgaagagcgatcaattgaaagcaatgattaatgaagatcatggtgccgaacttacttgcaatttctgcggtaacaagtatcattattcagaagatgaattgaaagatattttagctaaaaagaacaaagataaagattattaaggcaaataaagccctaaggttttaaccagcggggcttttttgatatcataatagggtaattttgaaaggatgatttggtgaataacagctggaaaattcgcgatatcaccattccaaaccgagttgttgttgcgccgatggcgggagtttcaaactctgcattccgcgttgtctgtaaggaattcggagcggggctggttgtctgcgaaatgatttctgatcatgggatcatttatggaaataaaaagacattaagtatgatggatgttgatccgcgtgaacacccaatgagcattcaaatctttggcggaagcgaggaaactttgcttcaagctgctcaatatattgatcaacataccgatgcggatattattgatattaatatgggttgtcctgtacctaaagtaacaaagactgatgcaggttcgaagtggctacttgattcaaacaagatttatcagatggttcacgcagtagtgcagaacgttaaaaagccggtttctgttaaaatgagaacaggctgggataaaaagcatatttttgctgtagaaaatgctttagctgctcaagaagcaggcgcaagcatgattgcgatgcatggtagaacacgtaaacaaatgtatcaaggtgaagctgactgggaagtattacatgatgttgcccaggtgctagatgtgccttttgtggctaatggtgatattagaacacccgaattagctaaaaaagcattggatgagatcggttgtactgcagtaatggttggtcgcgctgctttaggtaacccttggattttgaaagatatggtacactatctggaaactggtgaaaaattgaagccgcaaactgttcgtgagaaggttgaaacggctaaacatcagcttcacgcacttgttaaaattcacggtgaaaagcgtgctgtaccagaatttcgtcagcaagccgcgtattatttaaagggaattccccgttcagcccgtactcgtgctaaaataaatgaggtctggacgcgtcaagaagtatatgatttgcttgataattttgttgacgagtatgaaaaaagagaagaagctcgtgctgcacgacgcgcgacaatgaacaaataaatggaggaaaagtaaattggcaaagaatgaaatgaatgaccaattaatagttcgtcgccagaagatggaagaattacgtgaaaacggaattgaaccatttggtcaaagaaaatttgatcgtcaagatttggcaagtactttagaagaaaagtatggcaacgaagataaagaagaattaaacgctgatatgcctaagaccaagattgcaggtcgtatgcttgcaaagcgtggtaagggtaaggttggttttgctgatctttacgaccgtactggtaagattcaaatctatgtacgtaaggatattgttggcgaagataactacaagatctttaagaaatctgatattggtgatttcttaggtattgagggtgaagttatgaagactgatactggagagcttactattagagcccttcacgtaactttcttatcaaaggctcttcgtccattaccagataagtaccatggtttaaaggacgttgaggcaatttatcgtcaacgttaccttgatttgattaccaaccatgatagttacatgcgttttgttcaccgtacccaaatcattcaagctattcgtgactacttaaatagtcaaaacttcttggaggttgaaactccagtacttcacaacattcctggtggtgctgaagctcgtccatttattactcaccacaacgctttggatattaacctttacatgagaattgctttggaacttccacttaagcgtttgattgttggtgatatggaacgtgtttacgaaatcggccgtgtattcagaaacgaaggtttggacactcaccacaacccagaatttactgaacttgaaagttacgcagcatactgggactaccatgatgttatggatgaagctgaaggtattatccgtgctgcagctaaggttgtttcagatgacggtaagatcacttaccaaggtactgacattgacttaggcaagccattccgtcgcgttcacatggttgacttgatcaaggaaaagactggcgttgacttctggaagccaatgactcttgaagaagcaactaagattgcggaagaccacgacatccacgttgaaaagttctggaaagttggtcacattattaacgccttctttgaaaagtactgtgaagaaactattgttgacccaaccttcgtttacggtcacccagtagaaatctcaccacttgctaagaagaatgctgacgatccaagatttactgatcgtttcgaaatttacatcatgggtgaagaatacggtaacgccttctcagaattgaacgatcctgacgaccaacgtgaacgtttcgaagctcaaatggaagaacgtgaagcaggtaacgacgaagctgacatgatcgatgaagattaccttcgtgctatggaatacggtatgccacctacaggtggtttgggtatcggtattgaccgtttggtaatgcttttgactgatgctccagctattcgtgatgttcttttgttcccaacaatgcgtccagaacgtgttgaaagcgtagaagctgaagttaaggctgatatggaaaagaagaataaagaaaataagtaatcttataaattaaaaaactcttatctatgttttaagcatggataagagtttgtgtttatatattttttaattgagaatcattttttcatcagagtattttttaggatcatttaaatcccattgctgatatctaacttcttgacacttaaagcctaattttttgtaaagctttttggccttagtattttctgcaaatacatcaagactaactggtcgactcatgtatctcaaagctgtcgttgctaaagcatacccgatacctttattttgatgaattggatctacataaatgtaatccagttcttggggatgaactgcaacgaagcccaatatgctgtcagcatcataagctacataaattttgcaggagaaaaaatcatccttatatggagctgtctctaaaggtatgaagtatttttccgcaccaccaattgttagctcttctttacgactaacgtcgtgaatgcgacatacttcagcataatcgtttggttgatattctctgatattaaattttggcatgtttttctcgcttcctaatattaagattttgatttagaaagcaatagtacgtaatctcatgtgaaatctcctttaattaaattgaagatattatagcaatttttttaattcggtacaataactaaaattaacttagttaaaaacagataagtaatattttttcaaaaagtatttgcaaagagaataatctttgctataataatttttgtatcgcggaagtagttcagtggtagaacatcaccttgccatggtgggggtcgcgggttcgaatcccgtcttccgctccaagatgaagagctcacgaatgtgagctttttttgtgcctaaaataaatttatcttttttgataaaaaggtcttgcaaagaaaaatgtatttgctataataatatctgttgtcgcggaagtagttcagtggtagaacatcaccttgccatggtgggggtcgcgggttcgaatcccgtcttccgctccaagatgaagagctcacgaatgtgagcttttttgtgcctaaaataaatttatcttttttgataaaaaggtcttgcaaagaaaaatgtatttgctataataatatctgttgttgcggaagtagttcagtggtagaacatcaccttgccatggtgggggtcgcgggttcgaatcccgtcttccgctccaagatagaaggctcaccaagtggtgagtctttttttacgggaaatagctcagtttggtagagcgctacgttcgggacgtagaggtcgccggttcaagtccgattttcccgatatacaagctattcgtttgggtagcttttttctttttgttataatatcttttaaaacttaaagggagattaaaaatgacggcaactactgaagaaaaatacaaattattagtggagcaagctagagctttgattgagggagaagatgattggattgctaatacagctaatttatctgctcttttgtttaattcgttaaatgatgtgaattttgcaggtgtttatcgctatgaaaatgatgaactgatattaggtccatttcaggggatgccagcatgtgttcatattcaaatgggaaaaggtgtttgtggtacggctgcacaagcaaaaacaacgcagattgttaaggatgtacatgaatttgctggtcacattgcttgtgatagtgcttcaaattcggaaatcgttgtcccaatttttaatcagggaaaactttggggcgtctttgattttgattcgaccaagctactaagcgtataattttttacggtaagttgaataaataattaaaaaagcccaagtcctttgaatttggacttgagctcaaacaaaaagaccagtagtctgatgttaagaacaaaaaacacattagaagctggtcttttatgaattcaattgtaactgaaatcgcaaatattataaagtctgaagataattatattaagcgtgaaagaaaaataatctgtttcttcttaaacctgattaaggaaatcatggccttggctttagctaaagttgatgatgaaatgattaccaaggttaaagcacagggctatcagattgataagaagaatgagcgctcaatcaatatggcttttggcgaagttaggtatgtcagaagaagatatgtctgcccaggcaaacaagcaaggtatcccttggatgaattaatgggctttgacaaatacaagcgctacagtattttagcagtcaaaaacatcttagaagtaagcagcgttgccacttatcgcaatactgctctagcagtcaattgcctgtctggctttaatattagccatatgcaggtgggcaatttggtaaaaatggccgggaaaaatattaaagcgggccaagaagcagattcaagatatgatgccgcaggcactaagaaaaaggtcccagttttgtatcttgaaggcgatggcgtggtgatcaaaggcactaaaagccggttggaatttcatcgctatcaggtctgtgaaggcattgtcaatataagcaagaaacgcagaaagcgaatcaatgccaaggaatttgtttctttaagccgacttgatgcgctgaacgaagccaaggagtacctggccaatacttatgatctttctgatactgtaattcttagcaacgccgatggcggtgctggatatgccaaaacagacttcgatgacattgtagggctatgcaagcgtcatgagcatttcttggatgtctttcacctaaataagaaaatcaaagaaaggctatattttgcgcctgacctgcaaggcaagctgatttctgctttggaatacaaatacagctatgacaaagttaaaactatcctaaccactgcagaaagccgactaattgatgaattgaataccgagctcaatcatgattatctggggcgcctaaggaattatattgatcgtcattgggacgatattaagccgtttaagaaacgaaaactgactgtgactaaagccattggctgctgcgagagcaaccaccgcaagtatacctaccgtgttaaggggcaaggcaagaaatggtcaaaatctggagcagaaggcatgcttaggatcttaagctgcatcaagaatcgagagctggaattttggcttagcagcgagtttgaagattcagaaataactgtattgactgaacaggaattaaaagcagcggcccgtgacagcttaaagaagcgtcatgaagttcatttaggcatccagcatggcgcattaaccgcacaggtagctggcaatagttatttaagcaagctaagcagaaatttaagtcatataaatatttaagaaattaaggttagactaatggtttaaaggctaccgcaaaaacattgacacttacaccaagctagctaattttgacgaaattgataaaaagtatttaactgaaatagcgaaagcaatttttgcgtaattattagaattggacataatgaagttgaagataagtcaaattgttttacttactgacaaaagaaaagtaaaataccataacgtattttaaagggtggtgtttgtatggaaaattcatatagtaagagcgttaatcaagtattgaaaattgcacgtgaacaagcacaaaattttcatcatcgcttgattggcacagaacatgttttattggctctagtaattgaaactgacggtgaagcaggaaaaatcttgcgttcatggggattaacaccaactgcagtacgtgaagaaattgaacgttatacaggttatggctctgcccctaaggcaagctacatggaaatgtcaccacgtttgagtttagctttggattatgctagaagacgagctaatgacgatggagttaaggaagttaacactaatcatgttttgctgggaattactgcaagtgagcaggttttatcagcaatgattttgaaaaacttgaatgttgatattcctcgtctgcagcaggatgttgaagacagtttgagtcaagaccaagactttggtgattcagctaattggctgggtgatgataacacgacgactggtcaaaagaagcgcaagagcactactcctaacttagataaggtagcggttaatttaaatcaacgtgtgcgtaatggcgagattgatccggtgattggccgtgaccaagaaattaagcgtgtgattcaaattttgtctcgacggactaagaataatcctgtcttagttggtgaaccaggagttggtaagactgctgttgctgaagcgattgcaactgagattgtcaacaaaaaagtgccacaggatatgcttaagaaacgggtaatggccttaaatttaggtagtttagttgctgggactaagtatcgtggtgagtttgaagacagaatgaagaaaatcctgaacgaagtcaccaaggatggcaatgtcattctctttgttgatgaaatgcatactttaattggtgctggtggtgctgaaggtgcaattgatgcttctaatatcttgaagccttcgcttgctcgtggcgatattcaaatgattggtgcaactacttttaatgaatatcaaaagtacattgaaaaagatcaagctttggcacgtcgttttcaacaagtgcgcttaagtgagccttcaagagatgacactttgacaattatgcgtggcttgaagtcgaaatatgaaaagttccatcatgtgactatttctgatgagagcttgaaggatgcagttgatttgtcaacgcgctatatttcggatcgctttttgccagataaggcgattgacttagtagatgaagctagtgccgcagttaagattcgtaataacattagcaatgatgctgagctagaaaaagttaatgagcaaattaagaaactgattacgcaaaagaatatggctgccgctagtcaaaactttgttaaagctgctcaattgcaggatgagcagaacaacttagaaatgcaacgtgaagcaatggtagagaagttagaagacaaagttagtgctaaagctgtggttgagccagaagatatcgctaaagtagtttccaactggactggcgtccctgttacccagatggaacgcaatgaatcacggcagctagctaacctggaaaagattttacaccaacgtgttattgggcaagataaggctgtttcagcagttgcccgtgctattcgtcgtagtagaagcgggattaaagatgaacgtcgtccgattggttccttcttgttcctaggtccaactggtgttggtaagacagaactagctaagtcagttgcagcagcaatgtttggctcggaagacaatttgattaggctagatatgtctgaatatatggaccaaattgcttcaagcaaattaattggctcggcaccaggctatgtcggttatgaagaaggcggtcaattatctgaaaaggttcgtcgtcatccgtactcggttattttgcttgacgaagtagaaaaagctcatccagatgtctttaacttgcttttgcaggttttagatgaaggatttttgactgactccaaaggtagaaaagtcgactttagaaatacaattataatcatgacttctaatttaggttctcgttcgctctttgataataaggcagtcggcttcaatgcagataatgcagatccagccaaggcgagatcagctaaagttgaacaagcaatcaaacaattcttccgcccagaatttttaaacagaatcgatgaaactattatcttcgatgaactagataagaagcagctgcgcaatattgtaactttgttaacgcacaagctggtagttcgtttgcaaaagaagggtatcgaattgaagctatcacgggcagcactggatcagattgcacaagatggttatgatccagaaaatggtgctcgaccattgagaagagcaattcaaaatgatattgaagacaagattgccgagatgctgattgtaggcgaagttaagtcaggcgacactttgaaaattggtagtcagcatggacatttaaaatttgaagtagttaatccgaaaaaagaaactgtaaaagtcaagtgatattggtgctataccttgacaaaatgctgaaaatatcatataatttttgctgatttaaaaagactgagattcaggattttgctgatctattgtccagcaaaatgataagggacaaaaacgacaattgttgtttttgtcttttttatgcctaaaattgcagttttttgaatttgtaacagaaatgtaatatttgctttcttagacagaaaggatgtttttccttgttaaatggacacgtagtgaactacggtaaacatcgaactagacgtagcttctcccgcattaaggaagtattgaagttacctaacttaactgatgttcaaaccgaatcatataagtggtttcttgataaaggcattaaagaagtctttgatgacattatgccgattagcgatttctcaggtaagctttcattagaatatgttggctataaattgcaaaagccaaagtatacagttgatgaagcccgtaaccatgatgcaacttatgctgcaccaatgcacgttaccttgaaattgactaaccaagaaactggtgaaattaagactcaagatgttttctttggtgatttgccattaatgaccgaatcaggttcatttattgttaacggtgctgaaagagttatcgtttcacaattggtaagatcacctggtgtatattacactggcgattatgacaagaatggtcgtcaaatctttggtactactgttattcctaaccgtggtgcttggcttgaatatgaaaccgacgcaaagaacgtttcatttgttcgtgtagaccgtactcgtaaattgcctcttactgtattgattagagcaatgggtattggctctgacagtgacattattgatatgtttggtcaaagtgatactttgcaattcactttggacaaggatgttcataagaacccagctgactcacgtgtagctgaagccttaaaggatatctatgaaagacttcgtccaggtgaaccaaagactactgattcttcacgttcacttttgtatgcccgtttctttgatccacgtcgttacgatttagcacctgtaggtcgttacaagatcaataagaagctttcacttaagaaccgtttatacggtcaaactttagctgaaactttagctgatccagatactggggaaattgttgctaagaagggtactgtagttacccacgaagtaatggataagttagctccataccttgatcgtgatgactttaagatggtaacttaccaaccttcaaaggaaggcgtattaccagatcctattacagttcaagaaattaaggtttactcaaaggtagaccctgaacgtgaagttaaattaatgtcaaatggtcatattgctgataacgttaagcatttgactccagctgatgttttagcttcaatcaattacttctttgcattgcaagatgaaattggtactactgatgatatcgaccacttgggtaaccgtcgtattcgtcgtgttggtgaacttcttcaaaaccaatttagaattggtttggcacgtatggaacgtgttgttcgtgaaagaatgtcaatccaagatccttcaacagttactccacaacaattgatcaacattcgcccaattgttgcaagtattaaggaattctttggttcatcacaactttcacagtttatggatcaacataacccattaggtgaattgactcataaacgtcgtatgtcagccttagggcctggtggtttgacccgtgaccgtgctggttatgaagttcgtgacgttcactatactcactatggtcgtttgtgtcctatcgaaactccagaaggtcctaacattgggttgatcaactcacttgcttcatatgcgattattaataagtatggttttatcgaaaccccataccgtcgtgtttcttggaaggaccacaaggttactgataagatcgactatttgactgctgacgaagaagataattacattatcgctggtgccaacactccattgaatgatgatggttcatttaaggagaagttgatcttggctcgtcaaaaggaagataacgtcgaagtttctccagataagattgactacatggacgttattcctaagcaagttgtttctgtcgcttcagcatgtattccattccttgaaaacgatgactctaaccgtgctttgatgggtgccaaccagcaacgtcaggctgcaccattaattaatccgcatggttcacttgttggtactggtatggaataccgtgctgcacacgattcaggtgctgctttaatcgctaaggctgctggtgtagttgaatacgttgatgctaatgaaatccgtattagacgtgaagatggtactttggacaaatacacacttgaaaagtaccgtcgttcaaataactctaagtcatacaaccaaactcctaatgttaaattaggtgatcaggttgacaagagtgatgtaattgctaacggtccaactatggatcatggcgaacttgctttaggtcaaaacccattgattgccttcatgacttggaacatgtacaactatgaagatgccatcatgctttctgaacgattagttaaggatgatgtttatacttcaatcagtattgaagattatgaatcagaagctcgtgacactaagttaggtccagaagaaattactagagaacttcctaatattggtgaggatgctttgaaggatcttgatgctgatggtatcgttcgtgttggtgcagaagtccacgatggcgacattttggtaggtaaggtaactcctaagggtgtaactgaattatctgctgaagaaagattacttcacgctattttcggtgaaaaagctcgtgaagttcgtgatacttcacttcgtgtaccacacggtggtggcggtattgttcaagacgttaaggtttatactcgtgaagccggcgatgaactttcaccaggtgttaacacaatggttcgtgtttacatcgctcaaaagagaaagattcaagttggggacaagatgtctggtcgtcacggtaacaagggtactgttgctgcagttgttccagaagaagacatgccatacttaccagatggtactccagtagatatttgtttaaacccaatgggtgttccatcacgtatgaacatcggacagcttcttgaattgcacttaggtgcagctgctcgtcaattgggcattcacgttgcaacaccagtatttgatggtgctgacgaaaatgacgtttgggacacagttcgtcaagcaggtgttgataaagatggtaagaccgttgtttatgatggtcgtaccggtgaaccattccacaaccgtgtatctgtaggtgttatgcactacttgaagttgacccacatggttgacgacaagatccacgcacgttcaattgggccttactcattggttactcaacaaccacttggtggtaaagcacaatttggtggtcagcgttttggtgaaatggaagtttgggcccttgaagcttatggtgctgcttacacattgcaagagattttgacttacaagtcagatgacgttgttggtcgtgtaaaggcatatgaagctattgttaagggtgaaaagattcctaagccaggtgttccagaatcattccgtgttcttgttaaggaacttcaatcattaggtttggatatccgtgttcttgatatgaaccataatgaaattgaacttcgtgatatggatgaagactcaagtgaacacttgaacatcgatactttgtcacggatggcagaagagcaagaaaagaagaagttagccgaagaaactggaaaatcagaagataaagacagtaaagaaaatgcagataagccggtagctcctgcagatgagtctgacgataaagtttctaaatagtaggaggttaaacttttgatcgacgtaaataagtttgaaagtatgcaaattggtcttgcatcacctaacaagatcagaagctggtcatatggtgaagttaaaaagccagagaccatcaactaccgtactttaaagcctgaaaaagatggcttatttgatgagagaatttttggaccaacaaaagattggtcatgtgcttgtggtaagtacaagggcgttagataccgtggtatcgtttgtgaccgttgtggtgttgaagttacttcttcaaaggtaagaagagaacgtatgggtcatattgaattggctgcacctgtaactcacatttggtactttaagggtatcccatcaagaatgggattagttttggacatttctccaagattacttgaagaagttatttactttgctgcatacattgtaattgatccaggtgatactgaccttgaacctaagcaattattaactgaagctgaataccgtgaacaaaaagctaagtacggtaaccgttttgaagctaagatgggtgctgaagctgttcgcgatttgcttaagaaagttgaccttgataaagaagttaaggatttgaagaaagaacttcaaactgccactggtcaaaaacgtacgcgtgcaattagacggttagatatcttggatgccttcaagaattcaggtaacaagcctgaatggatggtaatggatgccgttccagtaattccaccagatcttcgtccaatggttcaacttgaaggtggccgttttgcaacttcagatttgaacgatttgtacagacgtgtaatcaaccgtaacaaccgtttgaagagattgcttgatttgaacgcacctaatattattgttcaaaacgaaaagcgtatgcttcaagaagctgttgatgctttaattgataacggtcgtcgtggtcgtccagttgttggaccaggtaaccgtccattgaagtcactttcacatatgcttaagggtaagcaaggacgtttccgtcaaaacttgcttggtaagcgtgttgactactctggtcgttcagttatcgatgtttcaccaaaattgaaattctatcaatgtggtgtgccacgtccaatggctttggaattgttcaagccatttgtaatgcatgaattagttaaacgtggaattgcatcaaacatcaagaatgctaagcgtaagattgaccgtgaagatgacgatatctgggatgtacttgaagatgtgattaaggaacgtccagttcttttaaaccgtgcacctactcttcaccgtttgagtattcaagcctttgagccaatcttggtaccaggtaagtcaattagacttcacccattagcttgtgaagcctacaatgccgacttcgatggtgaccagatggctattcacgtaccactttctgatgaagctgttgctgaatcaagattgttaatgttggctgctcaccacattttggctcctaaggatggtaagccaattgttactccatcacaggatatcgttttgggtaactactggttaactcaggccgaacgcggtcgtgaaggtgaaggtatgatcttcagctcaccagcagaagctgctgtagcttacgaaaatggcgatattcactaccataccattattggtatgtctgcagatgctatgcctaaaaagccatggcctaagggacatgaacacggcatctttattaccacttatggtaagattgtcttcaatcaattgttcccagatgattacttctatatcaatgaaccaactgaagagaacttgaacaatccgttggatgctaagtacttcttaggtgaaggcgaagagattgataagaagatcgatgaagtaggcgatgatttaatcgctagtccatttaagggaagcttcttgtcagattctattgctactatttacaagtattacaaggttcaaagaacttcagaatacttggatgatttgaagaagttaggctacattagctcaactacttcaggtattactattggtatgactgacgttccagaaatccaagataaggatgaaaaggtagccaaggcacgtaaacaagttgatgttgtttctaagcaatttagacgtggtttgattactgaacaagaacgtcacgaccgagtaattagtatttggaatgcatgtaaggacaagatccaaaacgaaattgcacaaattcacgcacctcgtaatccaatttcaatcatggcagactcaggtgcccgtggtaacatttctaactttactcagttagccggtatgcgtggtttgatggccactcctaacggtggtttgttcgaaattcctgttacttcaaactttaaggaaggtttgtcagtattggaattgttcatgtctactcacggtgctcgtaagggtatgactgatactgcattgaagactgctcagtcaggttacttgactcgtcgtttggttgatgttgctcaggacgttattattcgtgatgacgattgtggtactgatcgtggtattacagttagtgccatcatggaaggtgacgaaatgatcgaaccattatttgaccgtttggttggtcgtttcactgctgagactgttaaagatcctgaaactggcgaaactattgtcggcagagatgtcatgatggatgaaaacatggcacacaagatttgtgatgcaggtgtaactcacgttaagattcgttcaattcttacctgtgatactcctcacggcgtatgtcgcaagtgttacggtatgaaccttgctactggtgaagaagttgaagttggtgaagcagttggtactgttgctgctcaatcaattggtgaaccaggtactcagcttactttgagaactttccacaacggtggtgttgccggtgctgaagatatcactcaaggtttgcctcgtgtgcaagaattgtttgaagcacgtaaccctaagggtcgtgcaaccatttctgaagttgatggtgtaattgattcaattcaagaaaacccagcagaacatactcgtgaaattactgttaagggtaagattgatactagaagctacagtgttccttatacagcttcagttgctgttagcgaaggtgactacgttcatcgtggtgacaagttaactcttggttctgttgatcctaaggaattgattcaagttactgatacattaactactgaaaagtacatcttagctgaagttcaaaaggcttatagaatgcagggtgtagacattgccgacaagcacgttgaagtgttaactcgtcaaatgctgcaaaaggttcgtgtccttgatccaggtgaaactgacatcttgccaggtgaagttatggatattggtcaatttagagaccgcaacaaggaagttattatttctggtggtattccagcaactgctcaaagcgttatcttgggtattactaaggctgctttggaaactaacagtttcttgtcagctgcttcattccaggaaaccacacgtgttcttactgatgcatctattagaggtaagaatgatccacttcttggacttaaggaaaacgttattattggtaaaattattccagctggtactggtatgcctgtataccgcagcatggaacctgaagctgacgttaagaagccagattcagtatactcaattgctgatattgaaaagcaaatgaaagaaaaggataaagctaagcaagactaagctttattgaaaataaataagcatttccaatcttttaagagcgggaatgcttatttttttgtctaaaaaattaattgggttagtactaatcctaggaaaatatatggaataaatggatagcgatggttaataggagttttttcaataagaaaaattgcaattaccaagattgaagcaaatagaaaaactaaattggcaaatgatggggtgaagtagcaagcgataattaagtaaattaataaatcgcctagccccatttttctttgcattatgctatagctaaaaattcctagcaataatgtaaaagagatccagtcgattaatgtaaaagctgcaaattggttgaataaaatcgcaacgctaatggctggaattagtaggagaagatcaaattcttgcttttgataatcagagattgcaacgactaaaagcgaaaaaagcaaaatagcggtaataatgtcctgtgtcttactaaaatcgagtaaacaaaaggcaaagccgccaattaattcaaataaaaataattcaactggaatttgttgataacaataacgacattttccttgaagaaaaagataagataataatggaatttcatccaaaattgataattcaaggtgacagttgttgcactgagaacgtgagtaaataaaatttttatcattccagtgctcgtaaactactgctgcgtgagaagccaagcaacttccaattataaagttagtaaaaataaataagtatttcaaaaaaacacctccactatttattacgcaaaaatagccgatttttctttttttattttgaaaaagtttgctttctgcttaaaaccgagtacaatagtctttgtatgttttgaacagtctattcgtgagtaaaaaagaaactcccggatgtgtgaacaaaatagtattttaggaggaaaaattaatgccaaccattaatcaattggtaagaaaaggccgtcattcaaaggtcactaagtcaaagtcacctgctttgaattacagctacaacagtatgaagaaggaatcagtattcaacccagctccacaaatgcgtggtgttgcaactcgtgttggtactatgactccaaagaagcctaactcagctttacgtaagtacgctcgtgttcgtctttcaaacttgatcgaagttactgcttacattccaggtgaaggccacaacttgcaagaacactcagttgtattaatccgtggtggtcgtgtaaaggaccttcctggtgtacgttatcacatcgttcgtggtgcccttgatactgctggtgttgatggcagaaagcaaagccgttctaagtacggtactaagaaagattaaaggaggagttaaataatgcctagaaaaggtcacgtaactaagagagacgttttagcagatccagtttacaactcaaagcttgttactaagttgatcaaccacttaatggtcgatggtaagagagctaaggcatcttcaatcctttacgatgctttcaacattgttcaagacaagactggtaaggaaccacttgatgtatttgaagaagctatgaacaacgttatgccagttttggaagttagagctcgtcgtatcggtggttcaaactaccaaatcccagttgaagtacgtcctgaaagaagaactactttaggtttaagatggcttgtttcatacgctcgtttacgtaacgaacacactatggatgaacgtttagctaacgaaattatcgatgcttcaaacaacactggttcagcagttaagaagcgtgaagatgttcaccgtatggctgaagctaaccgtgcatttgcacactaccgcttctaatttgttcgttttaatttaaggagagaataatttatggctaacaagcgtgaatttccattagcaaagacacgtaacatcggtattatggcccacatcgatgcgggtaagactactactactgaacgtatcctttactacactggtaagatccacaaaattggtgaaactcacgaaggtgattcacaaatggactggatggatgaagaaaaggaacgtggtatcaccattacttctgcagctactactgcacaatggaaagaccacagaattaacatcatcgacaccccaggacacgttgacttcactatcgaagtagaacgttcacttcgtgttcttgatggtgccgtaactgttcttgatgcccaagctggtgttgaaccacaaactgaaaacgtatggcgtcaagctgaaacttacggtgttcctcgtattgttttcgttaacaagatggataagatcggtgctgacttcgataagtcagttaagtcattgcacgaacgtttaaacgctaatgcccatgctgttcaaatgccaattggttcagctgacacttttgaaggtgttatcgacttaatcaacatggttgccgacatctacgacgaagataagcttggttctaagtgggatactgttccagttcctgacgaatacaaggaagaagctgaagcacgtcgtaacgacttaattgaagccgtagccgatgttgatgacggcatcatggaaaaattccttggcggtgaagaaatttctaacgatgaattaaaggcagctatccgtaaagctactttggacttgaagttcttcccagtttacgctggctcagccttcaagaacaagggtgttcaaatgatgcttgacggtgttattgactacttgccatcaccacttgacgttaagccttacgttgctcacaatcctaagactggtgatgaagttgaacttatggctgacgataagaagccatttgcagctcttgcatttaagattgctactgacccattcgtaggtcgtttgactttcatccgtgtttacaccggttctcttgaatcaggttcatacgtattgaacgcttcaaagaattcacgtgaacgtgtaggtcgtttgcttcaaatgcacgctaactcacgtactgaaattccagaagtattctcaggtgacatcgctggtgctatcggtttgaagaacaccactactggtgactcattaactgacccagatcacccacttattttggaaagcttgaaagttccagatccagttatccaagtatcagttgaacctaagtcaaaggctgaccgtgataagatggacgttgctttgcaaaagcttactgaagaagacccaactttccgtgctgaaactaacccagaaactggtcaaaccttgatttcaggtatgggtgaacttcaccttgacatcatggttgaacgtatgagacgtgaatttaacgttgatgctaagattggtgaaccacaagttgcttaccgtgaaaccttcaccaaggaagctaaggcacaaggtaagtttgttcgtcaatcaggtggtaaaggtcaatacggtgacgtttggattgactttactcctaacgaagaaggtaagggttacgaattcgaagatgccatcgttggtggtgttgttcctcgtgaattcattccttcagttgaccaaggtttacaagaagctatgaagaatggtgttcttgcaggttacccattgatcgacgttaaggctaagctttacgatggtagttatcacgaagtcgactcatcagaagctgccttcaaggttgctgcttcacttgctttgaagaatgctgcttcaaaggctggcgcagttatcttggaaccaattatgaaggttcaagtaactactccagaagaatacttaggtgatgttatgggttcaatcactgctcgtcgtggtaccatggaaggtatggaagacagagccggtgctaagatcatcaactcatttgttccactttcagaaatgtttggttacgcaactactttgcgttcatcaactcagggtcgtggtacatttactatggtatttgatcactactcaccaacacctaaatcaattcaagctgacatcattaagaagcgcggcggagatgctgaatagcttccgttaagaactgattaatgcagttagcttaattgaaaacaatttcatataaaaaagagttatcatttttattcaatgtcattaagttaagacattgacaattaatattagacttttaaagcactgatttaacatttaattggttaaattggtgcttttttcgtacaacaaataaggcatagcacagattctgcttttttaagctacgcgatataaataatatacagctgatttgggcttaatatttctcttgtccttgcggcctggtctaattggaatggtataatagctgatctgaataaggatccgttcaaaatcttgcgttaaagaagaagccaaatacatgctctgaataatcaagcatgattgcttgaaattgatggcatattgatacttgcaatgcttttgcggaatataggcctgtgcatcaatttgactgattgcattaaacataatcatatgggcataaatttccatttcaataaatttatcttgtttggaatggaactgtacactgcctaaagaatacttcaatttcttgaaggaggtctcaataccccaacgcagatgataaagctctttaattctttttagcggataattttttcgatcaagattggttagcacaacttcccattcttctttgcctgatttggcatcattaattctaaatttgcaggctcgaaattttattgtgcataactcgccaaaatcccagcttagatcctgggtatttttagagcgatacttaatatattggcgataatgatgctggacatggtgaatattctcactggctttatgcgtgatgtagtaatagttagaagtagttaccaggcaggaaatctcacgatcacattcttgatcaggcaatgtcgttatttctttaactccgccttgtccagccttagttcgtattatgtaatgacagttaggcaggcgattgcagttttcaatcatattgaaactagtgtagccacgatccattgttacaatatatggaccacaattcaaagctttaagcatttgaacagccgctttgcgttcatccatttctgatttaggctgaaaaatacaatcctggtaggtattattcaatagatcatataaggcattaacgtgaatttgacaatagggtttctttttatgagaagaagcttgtacaatgttattcgatttcggattccagatttgattaaagtcagagccatcaatggcaaacaaacggtagtgatgatcaaaaagttgaatattaaatagattttgattaaaaacagtcagaatatgtttaaaacaagcaggagaaagctggcttttgcgttgaacataggcagaagtactaactactttatcgttctttttagttgcatcttcgccaaaagctctaaagagttcactgtttaaattctgaccttgcatgttaattgtagttttaaggactgtcgctgcatctaaagtgcgtttcctggtaaaagcatgaggattattaataaaatcgtgaatatgatccccagtattattgataatttgatcaagacgttctagaatattcttatgaagggctttcataattaacaccatctttctggcaataattttgaaggtttaaaatatataatatataagataggcgaaaaggctggtcttttcgcctttattttatacaaaaaaagagatcgaatccaaatgattcgatctctaaaaaagcacccttaattgtcaatgtcttaacttaatgacattgcatttttattttgataactctttttttgtaaataaatttaagaaaaaagtcgtaaacccttgatatttaaggagggacaaagtacaatagtttttgtgcttatgggacagtgtgcccttaagtgtgaaaatcgttgtaaagcgttgacgcaaaaggttgcggcacgccaggctgcattgccacagtggcgtgcggggaatttttgccgagcgagtcatcttttaaagaagacgttaaggaggtaatttaatggcaagtcaaacaattcgtattagacttaagtcttacgaacatggtattctcgatgaatcagctgctaagatcgtagctactgcaaagagaactggtgctgaaatttcaggtccagttcctcttccaacagaaagaactttattcacagttcttcgttcaccacacaagaacaaggactcacgtgaacaattcgaaatgcgcactcacaagcgtttaatcgatattttgaatccaacaccaaagactgttgattcattaatgaagcttgatcttccaagcggtgtagacatcgaaattaaactgtaatttaaatagaaagaggtgtaaacatgaccaaaggaatcttaggaagaaaagttggtatgactcaaatctttactaaagatggtgtccttgttcctgtaactgttgttgaagcaactcctaacgttgttatgcaagttaagactgttgaatcagacggttacgaagcagttcaattaggttaccaagacaagcgtgaagttttgagcaacaaaccagaaaaaggtcatgctgataaagcaaagacttcgcctaagcgcttcattcgggaaatccgcggtgttgagcttaaggactatgaagttggctcagaagttactgtggatacatttaaggaaggtgacgttgtaaacgttactggtacttcaagaggtcatggataccaaggtaacatcaagcgttggggccaatcaagaggaccagaaactcacggttcaagataccacagaattcctggttcaatgggttccatcattaaccgtgtaccaaagggcaagcgcttgccaggtcacatgggtgtgaagaaagttaccattgaaaacttagtaattgaaaaagttgttgcagacaagaacgtattgatgattaagggtaacgtcccaggtgctaagaactcattaatcgttgttaagactgcttctaaagctgtaaaggctgataaataggaaggaggactagaatggctaatttaaaagttatggatcaaaacggtaaagactctggtgaagttactttaaacgataaggtttttggtattgaaccaaatgaaagtgtcgtttttgaagcaattattagacaaagagccggcaagcgtcaaggtacctcaaaggttaagaatagatctgctgttcgcggcggtggtaagaagccttggagacaaaagggtactggtcgtgctcgtcaaggttctatcagagctccacaatggcgcggtggtggtacagtctttggcccaactccacgttcatacgcatacactatgccaagaaagcaacgtcgtttggctattaagtcagttctttcccaaaagttgattgacaatgatttaattgttttagataagttgactatgtcagctcctaagactaaggaattagtatcaatgttaaacggcttaaatgctgacggtaaagttttaattgtttcagatgataacaatgtacaactttccgcaagaaacttgactaaggttaaggttgttccagttaatggcttaaacgttgaagatgctgttaactatggcaagttgatcttagatcaagatgctgttaagaagatcgaggaggttttggcttaatggacgcacgcgatatcattttaagacctgtcattactgaaaagtccacgaacttaatggatgataagaagtacacattcgacgtgcttttaactgcaaccaagacacaagttcgcaatgctgttgaagaaatcttcgatgttaaagttaagaacgtaaacattatgaacgttcgcggcaaggacaagcgagtaggtcgttacactggtaagaccgctcgtcgtagaaaggctatcgttactttaactaacgattcaaacgacatcaagattttccaagacgataacacagaagacaacaagtaataggaggtcagtcaattggctattaagatttacaagccaaccacgaatggtcgtcgtcatatgacttcttccgactttgctgagatcactaagacaaagcctgaaaagactttacttgaatctcaatcacatactgcaggtcgtaactcatatggtcatatcactgtaagacaccgtggtggtggtcacaaacaaaaataccgtatcatcgactttaagcgtaacaaggacaacgcaaaggcagttgtaaaggctatcgaatacgatccaaacagaactgctaacattgctttgcttcactacactgatggtatcaaagcttacatcttagctcctaagggcttaaaagttggcgatgtagttgaatcaggtgattcagttgacattaagccaggtaacgctttggaattaaagaatatcccaactggtacttcaattcacaatatcgaattaatgccaggcaagggtggccaactcgtaagaagtgctggtgcttcagctcaagttttaggtgctgatggtgattacactttagtaagattacaaagtggtgaagttcgtaagattttgtcatcatgccgtgcaactatcggtactgttggtaatgaacaacactcattgattcaattaggtaaagctggtcgtaagcgttggttaggcaagcgtccacaatcacgtggttctgtaatgaaccctaacgatcacccacatggtggtggtgaaggtaaggctccagttggtcgtcctcaacctatgactccatggggtaagaaggcacgtggtattaagactagagataccaagaaggccagcgagaagttaatcattcgtcaccgtaaaggtagcaagtagtagaaggagggttaattaatgagccgtagtattaaaaaaggtccttttgctgatgcatcattgttaaagaaggttgatgcacaagcagatgcagataagaagcaagttattaagacttggtcacgtcgttcaactattttcccttcctttgtaggtttgactatagctgtttacgatggtagaaagcatgtcccagtatatgtaactgaagacatggttggtcataagttaggtgaatttgttccaacaagaactttccacggacacaaatccactgatgataaagccacaacacaagcttagaggaaggagaaacatctaaatggcagaacaaattagttcagctaaggctgaagcaagaactgttcgcatcgctccaagaaaagctcgtttagtcgttgacttaattcgtggcaagagcgttgctgaagcattagcaatcttggaatttacgcctagagctgcttccccaatcgttgaaaaagttttacgttcagctattgctaacgcagaacataactacgatcttgaaagtgcaaacctttacgtatcagaagcttacgtaaatgaaggtgcaactttgaagagattccgcccacgtgctaagggtatggcttctccaattaacaagagaaccagtcacgtagttgtagtagtttcagaaaagaacgattaagggaggtatattaatgggtcaaaagattaacccaaacggttttcgtctcggtgttatccgtgattgggaatcaaaatggtatgctgacaagggatacaaagaaactttaaatgaagaccttcaaatcagaaaatttatttcagaaaagttgaaggatgcctcagtatctactgttgaaattgaacgtgcagctaacagaattaacatttcaattcatactgctaagccaggtatggtaattggtaaaggtggttctgaagttgaagctttgagaaaacaattaaatgctttaactggtaagcaagttcacattaatattgttgaaattaagaaaccagatcttgatgctaagttagtagcagatagtattgctcgtcaacttgaagctcgtattgctttcagacgtgctatgcgtcaagctactcaaagagctatgcgtgctggtgccaagggtattaaggttcaaacttcaggtcgtttgaacggtgccgatatggcaagaagagaatggcacacagaaggtcgtgttccattacaaactttgagagctgatattgattacgcttgggtaaatgccttcactacttatggtgaaattggtgttcaagtttggatcaaccgtggcgaaatcttacctactcgtaagaataagccagcttcaaagccagcgaagggaggaaatagataatgcctttagtaccaaagcgagtaaaacaccgtcgtgaattccgtggtaagatgcgtggtgctgctaagggtggtaaatatattgcctttggtgaatatggtcttgaagccctcgaatcacattggattactaaccgtcaaatcgaagcagctcgtgttgctatgactcgttacatgaaacgtggcggtaaggtttggatcagaattttccctcaaaagtcatacactgctaaaggtgttggtgtacgtatgggttcaggtaaaggtgcaccagcaggttgggtagctgtagttaagagagaaaagattatgttcgaaattggtggtgttgatgaagcaactgctcgtgaagctttacgtcttgcttcaactaagttaccaattaagactaagtttgtaactagaagttcggaagtaggtggcgaatctaatgaaggctaaagatatcagagcattaaccactgatgaaatgttagaaaaagaaaagcaatacaaagaagaactcttcaatttgcgtttccaacaagcaacgggtcaattagaaaataccgctcgcttgagcaaagtccgcaagaatatcgccagaatcaagactattctgagcgaaaaagcgttagaaaacaattaatggaagggagctattaacttgagcgaaacaaacgaaagaaatcgtcgtcacgtataccaaggtcgtgtagtttctgataagatggacaagactatcgttgtagttgttgacacttacaagaaccaccctgtttacaacaagcgtattagatattcaaagaagtactacgcacaagacgaaaataacgaagctaaagttggcgatactgtacgtatcatggaaacccgtccattatctcgtaagaagcgcttccgtttagtaaagattgttaagaaatctgtttaatttgcggatttagtgaggggaggattacacagtgattcaaaacgaatcccgtttaaaggttgctgataactctggtgccagagaacttttagttattagagtcttaggtggttcaaagcgtaagaccggtaacattggtgacatcgtagtatgtactgttaaacaagcaacaccaggtggcgttgtcaaaaaaggcgacgttgtaaaagctgttattgttagaactaaatcaggtgcacgtcgtgaagatggttcatacatcaagttcgacgaaaatgctggcgtaattatcaacgcagacaagagcccacgtggtactcgtatctttgggccagttgcacgtgagttacgtgagaacgactttatgaagatcgtctctcttgctcctgaagtcttataattgatagtgaggtgcactgatgttcgttaaaactggtgacaaagtaaaagttattgccggaaaagataaaggtaaagaaggtactgttctttctgttaacgttaagaaaaaccgtgtagtggttaagggcgttaacaagattaagaagcaccaaaagccttcacaaagcaatgctaatggtggtgtagttgaatcagaaggttcaattcacgcatcaaacgttaaagtaattagtagtaaaaaagaagataagtagaagggaggacacacatggcaagttatttagctaaggaatacaacgaaaaggtagctcctgcattagaagaaaagtttaactacaagtcatctatgcaagtacctaagatcgacaagattgttttaaacatgggtgttggtgatgcagtttctaacgccaagaacttagatgaagcagttgaagaattaactttgatctcaggtcaaaagccattaatcactaaggccaagaaatcaatcgctaacttccgtttacgtgaaggtatgtctatcggtgctaaggtaactcttagaggcgacagaatgtacgatttcttgtacaagttaatcaatgtttctcttccacgtgttcgtgacttccgtggtgtatcaactcgttcatttgatggtcgtggtaactacactttaggtattaaagaacaattgattttcccagaaatcgattttgataaggtaaaccgcactagaggtttagatattgttatcgtaactactgccaacactgatgaagaagctcgtgaacttttgactcaatttggtatgccgtttgcaagatagtggaggacattaatggctaaaacatcacaaaaaatcagaaatcgtcgtcctgctaagttctcttcacgcgaatatacacgttgcgagagatgtggtcgtccacactccgtataccgtaaattcggattatgccgtatttgcttaaaggaattagcacacaagggtcaaatccctggtcttaaaaaggctagttggtagtatacggttaggaggatagcttaaatggtcatgacagatccaatcgcagattacttgactagaatcagaaatgccaacatggcaaaacacgattcagttgaaattcctgcatcaaacattaaaaagtctatttcagaaattttgaaacgtgaaggcttcatccgtgattacgaagttgcagatgataacaagcaaggcgttatcaaggtattcttgaaatatggtccaaatggagaacgtgttatctcaggtttgaagcgtatttctaagccaggtcttagaaactacgttggcgctgaagacttacctaaagttcttaatggcttaggcattgccatcgtttctacttctgctggtgttattaccgacaaggaagcaagacaaaagaacgttggcggcgaagtaattgcctacatttggtaatactgacagaaaggagaacaatcaatgagccgaatcggtttaaagactattgaagtccctgacagtgtcactgttaccaaggaaggcgacaatattactgttaagggcccaaagggtgaattaactagatacttcgatccaaagattaagtttgaacaaaaagatggtgaaattaacttttcacgttcaagcgaaagcgacaaagcacttcacggtactgaaagagctaacttagcttcaatgatcgaaggtgtagttgacggttataagaagactttgaagttaatcggtgttggttaccgtgcacaagcacaaggcaacaagattactttaaatgttggttattcacacccagttgtattgactgcaccagaaggtgtttctgtaaaggcaacttcagcaactgatgtagaagttgaaggtgtttcaaagcaagatgttggtcaatttgcagctgaaatccgtgccgtacgtccaccagaaccttataagggtaaaggtattcgttatgttgatgaatacgtacgtcgcaaggaaggtaagactggtaagtaataagtagttatttttgaggtgaaattgtgatttctaaaccagataaaaacaagttacgcttaaagcgtcatagacgtattcgtggaaaaatttctggtactgctgagcgcccacgcttaagcatttttcgttcaaataaaaacatctacgctcaattaattgatgacgtagcgggtgttacgcttgcaagcgcctcaactttggatgaaaatgtatcagatgcaactaaagtagaacaagctgctgctgtaggtaaggcaattgctgaagctgcaaaggcaaaaaacatttctactgttgtattcgacagaagtggttacttataccacggccgtgttcaagcattagctgatgctgctcgtgaaaacggattagatttctaggaaaggagaattaacacatggcaaaccgcaatgattctcgtaacaatcgcagaaacaaagacgatatcgaagatcaattagtcgctgtcaaccgtattactaaggttgttaaaggtggccgtcgcatgagatttgctgctcttgttgttgttggcgacaagaaaggccgtgtaggttttggtactggtaaagctcaagaagtcccagaagcaatccgtaaggctgtagaagacggtaagaagaaaatgatcaatgtacctaaagttggtactactattcctcatgaagttattggtcactacggttcaggtaacattttattgaaacctgctgaagctggttctggtgttgctgctggtggtgccgtacgtatcgttatggatatggctggtatctcagacgtaacttcaaagtcacttggttcaaacactccaattaacgttgttcgtgcaactatcgatggtttgaagaagcttagaactagtgaagaagttgcaaaacttcgtcaacctgaaagagcttaagattagggagatcatagatgactgatttaaagattactttaattagaagtgttgctcaccgtctacctcaacaaagaaagatcgttaaagctcttggtttaggtagagtggatagtactgttgttcttccagacaacgctgctactcgtggtgcattattaaagattgctcacttaatctctgttgaagagattaacaaatagaatatcaaggaggtgccaaattaatgaagcttcatgaattacattctgctgaaggctcacgtcgcaatagaaaacgtgttggtcgtggtacttcaagtggttacggtaaaacttcaggccgtggtcaaaagggtcaattagctcgtcaaggcggtcatactcgtttaggttttgaaggtggtcaaatgccattattcagaactatgcctaagcgtggttttaagaacattaaccgcaaggaatatgcaattgtaaacttagatgatttaaacaagttagaagacggcagtgaagtaactgtagaatcacttaaagataatggcttagtaaagaaagaattgtcaggtgttaagttacttggcaagggcgaattaaaagttaagttaactgtaaaggttaataaagtttccgcatctgctaagcaagcagttgaagccgctggcggaactgttgaggtgatctaatgttttcgaccttgaagaacgccttcaaagataaagaaattagaaataagctctatttcacgctctttattcttttgctgtatcggatcggtgcaaacattaccgttcccggtgttaatgcgaaggcgatcacgcaggttgcgcaaactggtttagttccaatgctggatactgtatctggtggtggactagataactattcaatattttctttgggtgtttctccttatattacggctcagattgttatccagctgctacagatggatattgttcctacgttagtagaatggggaaaacaaggtgaagtaggtcgacgtaaaacaaatcaagtaactagatatttagcattagttgttgcttttatccagagtattggtattacgttaggctttaacgctttaactcaaatgggtttggtaaagaatcaaacaccacagacttatatagaaattgctattattatgactgctggaactatgttattaacatggttgggtgatgaaatcactgataagggtctaggtaatggtatctcagtaattatttttgctggtattattgcaagactaccaagtggtctatggcaaatttataaggaagaaattattaataatagtgctagtgatcgttggcaaggcattttgttcttcatcgcggttatagttgcaatccttatcgtaactcaatttgttacatgggttgaacaagctgatcgtcgtattccaattcaatatacgagaagagcgacgatgagtggttctgaaagttttctaccattaaaggttaatgtatctggagttattccggttatttttgccagttcatttattgttacaccggcaacgattttaatggcctttcaaagaacccagggcgatcaacaatggtttaaagtaatgaaccaaatctttagcttacaaactactcctggggtaattatctacactcttttaattatcttatttacattcttctacgctttcgtacaggtcaaccctgagaagctagcagaaaacttacaaaagcagggtgcttatattcctagtgtatggccaggaaaagatactcaggattatatttcaaagatgttgatgaaattatcaacagtaggttcattattcttgggcttagttgctttactgcctcaattggctactaacttttggaatctcccaagttccattggtttaggaggaacaagtcttttaattgtgattggggttgttctcgagttatctcgtcaaattaacggcttgttaatgaagagagaatatgttggattcatcagataggaacggataaatgattaacttaattcttttagggttaccaggtgctggtaaaggtacagcatcagagcgaatcgttgataaatatcacttaactcatatttcaactggggatatgtttagggaagcaatggctaacaagacgaaggttggtcttgaagctaagagttatatcgataagggtaatctagtacccgatgaagttactgcaaagttggttgaggaacgtttaagtcaacctgatattaaagaaggttttatcttagatggttttccaagaaccactgtacaagcagaacttttagatggtattacaaaacgtttggagaaacctttaacaaatgtcattgcgcttgaagttgacgaagacactttgattaagcgtttatcagcaagatacatgtgtaaaaattgtggagctacttacaacaagctttccaagcagccaaaagttgagggcacttgtgatcgctgtggtggccatgaattttatcaacgtgaagatgataaaccagaagttgttaagaatcgtcttgaagttaatgaaaagatgaatgcacctttgaaggacttttatcagaagaaaggcttgctcactgtaattaatggtgaacaaactccagaaaaagtctttgaagatattgatgcggtattgagtaataatcaatagaagaaaaatttgtataattttttatccgtgttataatttcaaagtatatgactgtttaattgcggaggaacaactttggcaaaagatgatgtcattgaagtagaaggtaaggtagttgataccttacctaatgctatgtttaaagttgaattggaaaatggagccacaattttagcacacgtttctggtaaaattaggatgcactacattcgtattttgccgggagaccgtgtgactgtggaattatctccatatgatttaactaaaggtagaattacgtatcggtttataaagtaatataacggagggaaacatgaaggttagaccatctgttaaaccaatgtgtgaacattgtaaagttatcaagagacatggccgtgtgatggtaatttgctcagcaaatccaaagcacaagcaacgtcaaggttagaaatagagggggtgtagtttatggctcgtattgctggtgttgacttaccaagagataaaagaatcgttatcgctttaacttacatttacggtatcggtgaagcaactgccaagaaaatttgtgctgatgctggagtatctgaagatattcgttcaaaggatttaactccagaagatcaagaaaagcttcgtgctgaagttgacaagtaccgtgttgaaggtgacttacgtcgtgaagtaagcatgaacattaagcgtttagttgatattggttcttaccgtggtattcgtcaccgccgtggacttccagttcgtggccaaaataccaagaacaatgctcgtactcgtaagggtactaagagaaatcgttaattttatttataaggaggtttattgatgcctgcaaagaaaacagcacgtaagcgtcgtgtgaagaagcatgttgaaagcggtgtagcacacattcactcaacgtttaataatactttagtcatgattactgacgttcaaggtaatgcagttgcttggtcttcagctggtgcattgggctttaagggtagtcgtaagtctactccatttgcagctcaaatggcagctgaagcagcagctaagagtgcaatggaccaaggcatgaaacatgtagaagtttcagttaaaggtcctggtgctggtcgtgaatctgctattagatcacttcaagcaactggtcttgaaattactgcaattcgtgacgttacgccagttcctcacaatggttccagaccaccaaaacgtcgtcgtgtttaattttgtccttgatataggacgtaacgttttgaaaggggcccagtaatgattgaatttgaaaaaccaaatattaccgttgttgaacaagaagattcttacggtaagtttgttgttgaaccacttgagcgaggctttggtactactttaggtaattctttaagaagagtattacttacttctattccaggtactggacttgtttatgtgcaaattgatggcgttttacacgagttctcaacagttcctggcgtcagagaagatgtaaccaagatcatcttgaacttgaagaaacttgaattaaagtctctttcagatgaacaaaaggttattgaattggacattgaaggtccagccacagtaactgctgatgatcttaaagttgatgcagacgttcaagtcttgaatccggatcaatatatttgtaccattgctgaaggtggacacttgcatatggaacttgccgtaaagaatggtagaggttatgttgctgcaagtgacaataagagtgatgacatgccaatcggagttatcccagttgactctttattctcaccaattaagaaggttaactaccaagttgaatcaactcgtgttggtaagagagatgactttgataagctcacttttgagatttggactgacggttcaatcaagcctaatgacgcccttagttttgctgctaaaattttagttgaacactttaaggtatttgaatcagcagatgcaaatgctaaattcagcgaagtaatggtggaaaaggaagacgataagaaggaaaagaagcttgagatgactatcgaagagcttgacctttctgttcgttcatataactgcctgaagcgtgctggcattaatactcttcaagagttaactgacaagacagaatcagatatgatgcgtgtacgtaacttaggacgtaaatcattggaagaagttaaaaataaattaaccgacttaggtctttcacttcgtcaagaagactaagcttaggtgaataaaggaggcaaatccatggcataccgtaaattaggtcgcgatagtgctcacagaaaagcaatgcttagagaaatgactactcaattaatcatgaacgaacgcattgttactactgaaactcgtgctaaagaagttcgtaagactgccgaaaagatgatcactttaggtaagcgcggcgatttagcagctagaagaaaggctgctgcatttgtacgtgacgaagttgcagatgttcacgaagaaaaagatgcagttgttgttaagtcagcattgcaaaagcttttcagtgatgtagcacctcgttacaaggaccgtaatggtggttacaccagaattttgaagttagccgttcctcgtaagggtgacgctgctccaatggttattcttgaattagtttaatttagagtaacacaacttaatacgtattaagaattatccatgaaagtgagaataagcgtaaagatgatggcgcaagcttagtctagcttagatgataaaaatcatccctcttcatgggtgattttttttgctcttttttttctacccaaagtcaagtattatcaatgatttaagaaaataaatttacttgttttaatgatgcgaataaggttaaagcaaataagagtttaaatttaagaaaaagcgaaagtaccacaaataagcctatgaatacttgtagtttttccataggttgcttatacttaagttgattatttgatttcagctaaagtcttttatttttggtggctatgttgtaatcatataattgatcatgtttgataagagcaaacattgtgcgtatcagtttatggactgatgcaatggcgattttcttatagccttggctatttgaagatcgttttttcttgtcataataatcagttatatggcaaggctgcgtagcctttaccgtctccatttgaataataactcgataaagtatttttctggcaatatgattgccatgcttggtaatgccaagagaactgtctttttcaccagattggtaccttcctggatcaatgccaacaaacgcatcaatttgagctgaagtgctaaaccgtcttagatcaccgagctctgctactaatctcactgctgtaattctagcaacccctgggatactcaaatagatggataaagcacgagcgtttactgctttagccagcttttccatgtagttaattacatagtcgcgttcttgctggagtgaaaacaaattagaaatgttcctttgaatagctctaacgataatactatctttggaatcataaggataagcttctctagcaaaagcgtataatcttgtggttaagtaccgtgccctttgttgtcctattccagaaatagaattaagcatttgagttacctgtgtctcattcttttctagaacatatccagcatgtgggaaaagactaacaagcgcccaataaattctgccagatggatgagacagtatttcttcaatttgtgggaaagtggattggaggttgcggtgcaattgatttttagtagtaactatactcctagtaagttcttcataatagcgactggcattctgaagttcatgatactctctgggctgtggatcacgcaacttttgcggggcattaaattgaattaaagccaggcgataagcatctaccttatcagttttattatggcgtaaattattgtccattagctttttcgctttaagcggattaagcttcaaatacttaatatgataatcctctaagaaagcttgcaggcttagagaataaacaccagtagcttcgaaaacaactaaaggagttatcaaatattggttcagttgctcataaagtttttgatagccaaaggaatcattagagattctaaaagattcgccttgtttgatccggtcattaaccacacaaactgtggaagatttactgctaacatcaataccgaaaataatttgtgattccataatataacctccgctgtgaagataaacctctttatcaacctattaattctaattttctaaacacggcatctaagtgcccacagacttcgaagagacttaagaataggtggtaaagcagtccgtttcttttacgacatcaagtgtctaaaaagctgaagacttgatttgctttatcttcactttctattttagacaaaataaaaagtgccagatcgtgaatccgtcgattcatgatccaacactaggttagtatgtttctgttacaatatgctaataagcgatttaagaaaggaagtggaaaaatgccagtagatagtgctgttgaatttaaggatgtctcatttacctatcccgatactaaaaaagcgattcttgatcagattagttttaaaataaaaagaggttcctggacatctttgataggtcacaacggtagcggtaagtccacaatttctaaattaattaatgggttacttttgcctgattctgctaataattctagaatcactgttttaggaatgacgttaaatcaaaagacagtctgggatgttagggaaaaagtcggtattgtatttcagaatccagataatcagtttgttggagctactgttggcgatgatgttgcttttgggcttgagaatagagctgttcctcgggagcaaatggtaaaaatagtcagaaaagttttagcagacgttggaatgctggattatatagatgcagagccagctaatctttctggtggacaaaagcaaagagtagcaattgcaggtattcttgccgtagaaccgaaaattattattttagatgaatcaacttcgatgcttgatcctaaggggagagagcaggtgctaaaaattattaagcatttaaagaaagagaagaatttgacagttatttcgattacacatgacattgatgaggctaatatggctgataatgtgatcgtcttaaatgatggcaagattttagctcaaggaactccaacggaaatttttagtaaaactgaaatgttgcaagaaatagggctagacattccatttgtacaaaaattaataaataaattaaatgaagtgggaatttctgtacctaaaaatataaaaacgaaagatgagttgaaacaatatctatgtcaattaaatttgaaaaagtaaattatatctattctcccggaacttcaatggagaaaaaaggattagataatgtttcatttgaattaactgaaaatagttttgttgcattggtaggtcataccggtagtggtaagtcgactttgatgcagcattttaatgcattactgaagccgagttcaggaacaattgatattgctggttatcatattactgctcaaacaggaaataagaatttgaaaaagttacgcaagcgggttagtttggtttttcagtttcctgaagcacagctttttgaaaatactgtgcttgaagacattgaatttggtcctaaaaactttggagcaaccgatgatgaagctaaaagtaaagctttgaaatggttgaagcgagtaggattggataaatcgctagcaaataagtcgccatttgagttatctggaggacaaatgcggcgtgttgcaattgctggggtaatggctgatgaaccagaaattttatgcttagatgagccagcagcggggttagatcctaagtctcgtaaggaaatgatgaaattatttgttgactatcaaaaagcaggtcatactgtaatcttggttacgcataatatggatgatgtggccgaatatgcagatgatgttttagtgatggaacatggtaaattagttagacatgatgcgcctaaggcgatttttactaataaaaactggctagaaaagcactatttgagtgaaccaacggctagtctttttgcctcagatttgacgaactttaactttaaagataaaccgttaacactggatcagcttattaatgaaattaagaaaaatttgcgagggtagtttatgagtaagataattgtaggacgttatattccgggagattctcttatttataaaatggatcctcggagtaaattattagttaccatattatttatattggctatctttttagctaataattcaataacttatgcgattgtgaccattttttgttttttggctgtgatcgctacaggattaaatgcaaaagtattttgggatggcgttaagcctttgattggtttaattttctttacgtcgcttttgcaattgttttttatgactggtggtcatatttattggcattggtggattttttcattatctagctatggtttgattaatgcaatctatatttttattcgttttacattaattattttaatttcaacagtaatgacagttactacaatgccacttgaaattgctgatgcgatggaatggctgcttaagccgcttaagttgtttaaagtgccggtggataaaattgcgttagtaatttcaattgcgcttcgttttgtaccgactttgtttgatgagacttttaaaattatgaatgcgcaaagatcacgtggagcggacttcaatgacggtggtttaattcaacgtgctaaggcaattacgcccattttggttccgttgtttattcagtctttagaaacggcaattgatttatctacagcaatggaatcacgtggttatcgtagtagtgaaggacgaactaaatatcgcgttttaagttggtcaaaatatgatttaattgcattattttattttgtactgttagtcggattactattaacttttaggacatattagaaatatgacgacaagatataaaatgacgatggcttatgatggtcatctttttcatggctttcaacttcaaccagaccagcgaactgttcaggggacaattgaagatgcgttgaagaaaatgactaaggggcagcgtgtgattgtgcaggggtcaggtagaactgatgccggtgtacatgcggttggacaggtaattcattttgattatcctggtaaaactattccagccaatcgaatgattttggcaatgaattctatgatgccaaccgatattatctttgatgattgccaaattgttgatgagaattttcatgcgcgttattcgattaaggggaaatggtatcgctatcgtgttagtttagatcattttgttaatccatttaaacgtttttatacaggacattttccatatccactagatattgaaaagatgcaaattgcggcacaagatttgttgggaaaacatgactttactagttttgcggctagtggtggtcgaattgaagataaagtgcgaacaatttattatgtaaaaatcacagaggataaaaaagataatgaagtgatttttgacttcattggttcaggattcttatataatatggttcgaatcatggtagcagcgttgcttgagattgggaatgatcgtagaccagtgcatgatttgcagcgggtaatcgcggcaaaagatcgacaagaagtgagacaaacagctcatgccagcggtttatatctttatcatgttttttatgatgaagtaccacaaaaatatcgcttagatcagcatttataattgacattttgcctaaaaggacgtactctaatatagtatgtttgtccacgataggccccggaaacttattgttttcaaactgcaaataaacggaggaatttaaattgcgtactacaccattagcaaaatctagtgaaatcgaacgtaagtggtacattattgatgcaactgacgtaacccttggtcgtctttctgctgctgttgccactattttgagaggtaagaacaagcctcaatacacacctaatgttgatactggtgataacgttatcgttatcaacgcatcaaagattagattgactggtaaaaaggcttcagacaagttctactaccaccactcatcatggcgtggcggcttgaaggccgtttcatacggtgaattgcttgctaataacccagttaagatggttgaaatctcagttaagggtatgcttccaaagaacactcttggtcaccatgaattcatgaagatgcatgtttatgctggcgaagaccacaagcacgaagcacaaaagcctgaaaagttagatattaacaaattaatctaggaggttatataatggcacaacaagctgcatacacaggtactggtcgccgcaaggattcagttgcgcgtgttcgtttagtaccaggtaacggtaagatcactgttaacgataaagatgttgatcaatacattccattccctaacttggttaaggacttgaagcaaccattgacattaactgaaactgaaggtcaatacgacattcacgttaatgttaacggtggtggtttctcaggtcaagctggggctatccgtcttggtatcgctcgtgcacttcttgaagttgacccagacttccgtagtccacttaagaaggccggtttcttaacccgtgacccaagaatgaaggaaagaaagaagccaggtttgaagaaagcccgtaaagcttctcaattctcaaagcgttaatatttacgttcaaaaatgttgttatatcaacgttttggagacttcagttggtcacctatggtcacaatgctatagggattccaatagatttaaagcattcgcatcttgcgagtgctttttttctggcattaattccagatagtatttttcagtagttaagattgaatcgtgtcctaatcttctgctaacataagataaaggaatattattactgaataaaaaagaagcgtgggtatctcttaaaccatgaaatgtggttgaagggatgcctatttttttgagcaattcttttaacataccagactgtttaaagctgaaccagtcaaacaaatagccagaatctttttgagagatatccttcaatagatcgtaaatattcttaggaatagtcacactgcgtctagaatgtttagtttttaatttagtatcgtcagtagtagggctaattgatcgttttacttcaacgcaataatactgaccatcgtaatgcacatcctcaggcttaatacctaaaatttcaccacgtcttaaaccagtactaatctcaagtaataccattaagttaaattcattatctgtatgttcaagtaagtaatgttttaacttagttagatcagacattgatgaagctttattgcgtttaggtaattcttttccgtgtgctttaagtaaactagcaaaatcattgtaaatgtatcccttaacataagcatagcggagagcagttctaattttcttaagtaattcagttaccgttttcttagaatgtgttttgccatatttatctaagatactttgcatttgtacgtcatcaagcttaccaagtttagcggttggaaaaagattatcaattactttaccagctttaacataattatcaaaagttgcttttctaacgtcatgtacttttactgtttgaacgaataaataataaaagtccttgaataaagtgttttgctgggctattgcttgacctttagccttttgtagttcaagagtagtactccaaactttagcttctttttcagttttaaaactcttagttaagtaatcacgttttccgagactgtaaaatagtttgtgtaaggatgaatgattccttaaatttatttctttaaacattagaaaaaggagttcctttctcgtatgattggtttgaacaaaaaaaacacatacagaaagaagaactccttcatgaatgattttaccaaagattttgctcaagctctattcaatccagacaaaataaatgatttattgcgcaaagaactacaacaggctgttaataacttgctagaagctgaattgactgcctttctgggctatgatccctatgccagaaatggctggaatactggcaactctagaaatggtgcttatttccgcaaagttgatacgcaatttggcccaattgaagtgcaagtgcctcgggatcgcaacggtcaatttcatcagcacacgctgcctgactacaagcagcactcggatatcttggaaagcatgattatcaagctttactccaatggcgtgaccaccagggaaatagccgatctaattgaaaagatgtatggcagccattacagtccagctcaggtatcaaatatttccaagcagatgattccaaaggttgaggcttaccacaaacgcaagctaagcgacaagtttttctgcgtctatttggatgcgacataccttcctttgcgccgagaaacgtttgagcgtgaagcagtctatattgccattggcattaaacctaatggacataaggaagtcattgactactgcattgctcctagtgagaacattgaagtctggacagagatgcttcaaaacatgaagtccagaggcttgaagcaagttgaactctttctttctgatggtgttgttggcatgaaaacagccttggccaggacttatcctaaagctcattttcaacgctgtttggttcatgtcatgcgcaatatctgcgctaaagtacgcgtcgacgatcgtgaaaagatcatgaacgaattcaaacaggtgcatcaacagacaaacaaaaaagaagctgcagctgtcttgcacaaattctatgccaaatggaataaagcttatagccatgtcatcaaaggtttgaaggaaattgagcccgatctgctagtcttctacaattatcccaaacaaatcagagcttcaatttattcaaccaatatgattgaatcctttaacaacgtcatcaagcgtaaagctaagcctaaggcagaatttccaactgaacagtcgcttgatgcatttattggcatccaggcaatgagctacaatgaccgttatttcaatcgaattcataaaggctttggtcaggttcaggacaccttagaatcctactttgattaaataaataattaaaaaatcaatttacgagaaagatctatttacacaaaagatttgacagtttccgttttccatgttgatagattgttactctggctctatatgatgagccacgtttttcaatacttgccataaatttaatcgtcctttcaaaagaaaagccgattatcttaccagcaataaagttagcagataaccgactatttctcaaatctttttcaattttgtttctttaagatcgatgaaagcttcgatacttttaatggtaaagcgttctgtgtgttctcctagtttaaatcttttaaagtcaggatcagagcgaaatactttatcaaaagttttgggatcaataccaatatattttgaagcttcttcgcgagttaataatttagccactattattctcctgagattgtttagttaccaatattgagataaaatctaggtagtaggtaatctagtcattgcttttgtctctattagcatgactagtatttttttgcgattttatcttccaaattgcttcggataatttatcatcagtgattagatcatttttaactttattagtattgcttttagtaagttgcaacgggataattcgtcttttcaactgttcaaaagaatcaatgacttgattagcaatattacattcaagataaaaactaagtggatcataaggggtagtgatgtaaatggcacgcgcatttagataacgatcgtgataccttgcgggagccattttgtctatttcccaaggatccaaaagggtaagtagttgaccatagtcatagtcatttggtcgcaagtcattaattactatgaatttttgccctttgtattcttgaaagtgatcccgttgactacctgaaatacagaaatcttcaggatgttgtttttctaaaatttcccgtactaacttagtcttaccaattccggaaacaccatatatccagtagaccttacaactctgacctttgaagtcctttaaaaaccgttgatgctttttgtaagctaggatgtcttcaatatgatctaacagtgttttatgttttgccatctcaagaacaccgatttcttcttgaagttcttctttagtgattttttcatttgaataatcatcaataaagttttcaattgcttgtcgtgatggctttttgactttttgtctaatctcattgattctatctttaaaatcaaatgaagctactacttcttttggatcataatgatgtttactcttagcattagtagtttcatggatcagatagctatagccattgttaataatactgtgccatgcttcaatatattgttcatgatcattgaaaatcttagatactcttgaaatggttttagcatctttgaaatgaagcattacatgatagtgaggtcgaatcttttaacttatctttactaaatggtaaatgatctaaatcttgggtatacataaagttgtgagaacgtattatttttttcacaattaaagatttcctttctattcaacacgaactacatattaactttggggctagataacaagttcattattactttatttttgtttatcagatggaaagcaattgcaagaagcagcagatatattagccaaggctaaggtgcatctatctatggtgatattttcaccttaaatcaaactgcagcagctatggttaaagttgctcaaggaggtaataagggtaaagtattactgcaaatgaatgaagcttaagttaacatgaaataataaatacatttagataaagaaagaccctcaaagattctaaatttgaatttttgagcgtctttttagattgctaatcattttaaaggtacttgtattacatttactcctgctttaataaattcattaattacactgttttctacaaaagtatcagttattaataaatcaatatcttttattgttccaatagtaaaattagagaatttattgaacttgctatagtcggcaacaacaataaccttttgtgattgctgaataatagttttattaacttctgcttcttccataactggtgttgaaataccttggttaatgctaattcctgcgcaaccaataattgcatagttggcacgtaaagatagaaatgctttagttgccaaatcaccgctcatgattaatttatgatgtatttccccacctgttaagatcactttgcttttagtattttcaaaatttccagcataaccattgttagtaacaattattatatcctttgttaataaatgtggaattgcatcaaaggctatactactagagttaataaatactatatctccatcgtgaatatatctggctgcctcttttcctaagctttgcttaatgtaactaacgggctgagataatgggatttcttctggtgcaacaagggatatgacaccacgcttttttgaaatcttacccatttttgacaaataatcacagtctcgtcgaatagtcatttcagaaaccttcatctttttgcttaattcagaaatagaaatttcccttgtgtgatttagtaaatcaatgatttgcttgcgacgttttttaattacttgaattgaatttttcatttttaatgatctctttcacttcaataaatacttactaatacttcaccagaaaagcattaacttttgaatttaaataaaaaacgacccgaactggttactattttaccattcaaaataataattcacatattttatgttataaagtaagtgtcaatgtttttgcggtagcctttaaaccattagtctaaccttaatttcttaaatatttatatgacttaaatttctgcttagcttgcttaaataactattgccagctacctgtgcggttaatgcgccatgctggatgcctaaatgaacttcatgacgcttctttaagctgtcacgggccgctgcttttaattcctgttcagtcaatacagttatttctgaatcttcaaactcgctgctaagccaaaattccagctctcgattcttgatgcagcttaagatcctaagcatgccttctgctccagattttgaccatttcttgccttgccccttaacacggtaggtatacttgcggtggttgctctcgcagcagccaatggctttagtcacagtcagttttcgtttcttaaacggcttaatatcgtcccaatgacgatcaatataattccttaggcgccccagataatcatgattgagctcggtattcaattcatcaattagtcggctttctgcagtggttaggatagttttaactttgtcatagctgtatttgtattccaaagcagaaatcagcttgccttgcaggtcaggcgcaaaatatagcctttctttgattttcttatttaggtgaaagacatccaagaaatgctcatgacgcttgcatagccctacaatgtcatcgaagtctgttttggcatatccagcaccgccatcggcgttgctaagaattacagtatcagaaagatcataagtattggccaggtactccttggcttcgttcagcgcatcaagtcggcttaaagaaacaaattccttggcattgattcgctttctgcgtttcttgcttatattgacaatgccttcacagacctgatagcgatgaaattccaaccggcttttagtgcctttgatcaccacgccatcgccttcaagatacaaaactgggacctttttcttagtgcctgcggcatcatatcttgaatctgcttcttggcccgctttaatatttttcccggccatttttaccaaattgcccacctgcatatggctaatattaaagccagacaggcaattgactgctagagcagtattgcgataagtggcaacgctgcttacttctaagatgtttttgactgctaaaatactgtagcgcttgtatttgtcaaagcccattaattcatccaagggataccttgcttgtttgcctgggcagacatatcttcttctgacatacctaacttcgccaaaagccatattgattgagcgctcattcttcttatcaatctgatagccctgtgctttaaccttggtaatcatttcatcatcaactttagctaaagccaaggccatgatttccttaatcaggtttaagaagaaacagattatttttctttcacgcttaatataattatcttcagactttataatatttgcgatttcagttacaattgaattcataaaagaccagcttctaatgtgttttttgttcttaacatcagactactggtctttttgtttgagctcaagtccaaattcaaaggacttgggcttttttaattatttattcaacttaccgtaaaaaattatacacttagtgttataaatgacttgaattttacaaaaattaacataaaatatgctaaattaacatatataatggttgaaagcactcacatctaagcgcataataacattgaagacgaggataagaaaattaaggaggatttattcatgtcagcaccaaaaaaaatagaagatgttaatttcaaaacttttgcagaaaacaatttcccagaatggggtacgttcttgaatgaacaaattgctgataagcaagtaccagaaaaaagtattgcaatgtggtggttaggctgtatgggggtttggattaagactcatgaaggcaccaacgttgctattgatatgtggaacggtactggtaaacatactcacggtgacggtaagatgcgtaaaggtcaccaaatgatgcgtatgaccggtggtgaagctttacaaccaaaccttagaaacaagccatatgtaattgatccatttgcacttcgtgatcttgatgctttatgtgtaactcacactcaccatgatcacttggatatttacactgcagcatgtgtaaacaagtattgcccagacgctaaatttattggacctcaaggcgttgtcgatgaatggatcgaatggggtgttccaaaggaaaagaccattgttgtaaagcctggcgatgaagtcaaggttggggccgtaactattaaggcaatggaagcctttgatagaactgaatttgttaccgaagatgatccaaacaagaagttagcaggtactatgccaattgaaatggctaaagttgctgttaactacttagttaagacttcaggtggtaacgtatatcactcaggtgactctcactattcaaacacttacgtaaagcacggtaacgaaaacgaaattgacgtaactctatgtgcatacggtgaaaacccacgtggtatcactgataagcttgacgactcacaagttttgagaatgggtgaagctttaaagacaaaagttattattccaatgcactatgacatttggactaacttctacagtgatcctaaggatattttagctctttgggaccgtaaaaagtaccgtttgcaatataaatttaagccatatatttggcaagttggtggtgaatttgattatccacaagacaaagataatttcgaatacatgtatgatcgtggattccatgatgcatttaagaatgatccagacttaccattcccagaaatgctatagtcccgtttttgttgattaactagctcaacgtctttaaccaaagctgttgagctgagggaggagacgctgatgttacgttactttttagaaaataatttattaaacattactgatgaacatcctgagacttgggaagaagcaattagagttgctggtaaggtaatgaagcaagacaagttagttactgatgattatattgattcagttattgctgatgttaagaaatatggtccatacattgttattgttcctggtgtggcaatgccacactcaaaggctgatagcgaaggagttttaggtactggtataggtcttacaattttgccagaaccagtttcattcgatgaatcagacccagataaaagtgcaaaattattctttatgctagcagctaaagataataatacacatgtcaaaaatattgcccatttatctgacatgttaatggaagataacatgattgatgatctttctaaggttaagaatttagacgattataaggcagtaatgaagaaacataatatgtgatatcggaagcggggagtataaatggctatattaaatattctatctaagatatgggattattttgctaccaatattttgcaacaaccagctttcatgattggttttattgtcttacttggttatatcttagagaaaaagaaatggtatgaggtcctttcaggcttcttgaaagcaacagttggatactttattttatcggctggttctgttggactgatcaatacttttagaccaattttagtcggattaaaagatcgttttcatttgaatgcgatggtaactgatccatattttggacagaatgcagttgctgccggaattatgaaagagtttggtagatcttttgccgatactatgcttttgttgttatttgcatacattatcaatatcgtgttagtaagattttcaaaatatactaaattacgtgctgtttttacaactggtaacgtgcaagtacaacaagcggctaccgctttctggttgatcttgttctgttttccaaaattaggtcatttacctattttaatcgttatgagtattatcttaggtttatattgggccgttggttcaaacttaactgtagatattactcaagagttaactgatggtgctggctttgctatcgctcaccaacaaatgtttggtatctttattttcgctaaattatcagaatttttggaaaatagagccaaaaagaaaggtaagaaagaagccagacgattagaagatgtaaagttaccaggtttcatgtcaattttcaacgacaatatggtatctacatcaattttgatgttaatttttatcggtgcaattttagtagtattaggtccagattacttagttaaagctaaatttatgcaacctggccaaagttttattttctacatcttacaaacttcattacaatttgcagttttcttagcaatcttacaattaggtgttcgtacattcgttaatgaattgactgaatctttcactggtatttcagacaaatggttacctggctcagttcctggtatcgatgtcgcagctaccttaggttttggttcacctaacgcaggtacaattggtttcttgtttggtgcattaggacaattcacaatgatcattttattgttgattttccactcaccaacaattgttatcgccggatttatcccgttattctttgataacgctgctatcggtttgtattcaaataaccgtggtggtttcaaatatgcaatgatcatgccttttatttctggattgatccaaataggcgggtctgccttaattgctacctgggtaggtatggcgaaatacggtggttacatcggaatgttcgattgggctacagtttggccattcttcacagtattgatgaaattcttaggctttgttggtatttgctctttaataatcattttggtaatgattcctcaattgcaatatcgtgccgataagaaaggttacttcatgattactgaagattatgaaggttggaagaagttacatggtaaagaatagaggttaattaaaatgaaaataatgtcagcttgtgctaatggttcgggaactagtttaatgctttctagaaccgcaagaaaagcaatggaacaattaggttatgaaattacagtttcagatcatacttctgtttcagaagctagaggaactgctagaaactatgatgtggtatttacatcattaccttttgtgaacatgtttgatgaagtaaagcaaaagggtggcgaagtaattggcgttaagaatgtaatgtcagttcctgaagtaaaagaaaagatcgaagcttcagatattccaaataagtttaagaaataatcttaggagaattaatttatggctttaccaatgttacaagttgctttggattgcgagagtactgctgaagctttaaatgtcgcaagacaagtaatggatcaagttgatgttttggagacaggaaccattctttgttatcaagatggtgtaaaggccgtatctgctttaagagcagtgggaccagataaaatagttttagcagatgttaaatgtgctgatgccgggactaagttcggtaaggcaagcaaagatgcaggtgctgattggatgacttgtattaacgctgctactgttcctaccatggttaatgctagaaaagaaattgaagttcaagttgaattatatgaaggctgggacaataaagaacgtatgcaagaatggcttaacaatggtattgatcaagttgtttaccaccaaagtagggatgcaaaatttgcaggccaaaaatggggcgaaaaagatgttgcaaacgttaaggccttgattgacatgggctttaaggtttcagtaaccggcggagttcatccggaagttttgaaattatttaaagacttaccagtgtattgttttattgccggccgtgatatcagaaatgcggaagatccacatgcgcgtgctaagcagtataaagatgaaattaagcgcatttggggttaatcattaattttactcatattaaaaaattccttaattagttttagaaagggcaatgcacgtaaaaacgtttattatgcattgctctttttgtattaaaaggcaggtataggttatgactgtaaactcattaggtatttacgaaaaagcattaccacaagatttatcttggaaagaaaaatttaatttagttaaaaaattaggcttcaattttttagaattttctgtagatgaaagtgatgcacgcttagcacgtttggattggaccaaggaacaaagaaaagaatttagagatttaatgtgggacactgacattcgaattaataatttgatgttatctggccacagaagatttcctcttggatctaaagatccagaaaccagaaagaaatctcttgaaatgtgccaaaaggcagtagatctctgtgtagatttaggaattcataatattcaaatggcaggctatgatgtttattatgaagaaaagagtgagaactctagagaattatacgttgaaaacttagctaaatgtgttcatatggctgcaaagaaaaacattatgctttcgattgaaacaatggatgatccatttattactaacattgcagatattaaacaatataaaaagcaagttagaagcccatggcttcaagcctatccggatttgggtaacctctctgcttggccacaaaatgatcctgctaaggatttagagaatggaattggtaatattgttgccatccacttaaaagatactctggcagtaacagatggttttgagggtaagtttagagatgttccatttggtgaaggctgcgttgattttgaaggactacttcgtgaattagtaagactagactataacggaagttttacgattgaaatgtggccaggtgataacggtgatgatgatcctgttgctgaagttaaagaggccaaagctttctttgacaagatctttaaaaaagttggaattgaacaagaacctgtagattagaaagtggaaaataaaatgttagaagatttgaaaaaagaagtctatgaagccaatatgcaattacctaagttaaatttagttacttttacttggggaaatgtttcagggattgatcgtgaaaaaggtctgttcgtcattaagccatcaggtgttccatatgaagaattaactcctgaggatatggtagttgttaacctaaaaggtgaagtggttgaaggtactagaaatccatcttcagatactcctacacatacctatctatataatcattttcaaaagattggtggtatcgttcatacacactcaccttgggctgtttcatttgctgcagctaagatggatattccagctttgaacaccacacatgcagatactttctatactgatgtgccagcagctgatgcattaactaaagaacaaattgaggaagattacgaaggtaatactggtgtcactattgtcaaaacctttaaagagcgtggtctcgattatgaagcaacaccaggtgctttagtttcacaacatggcccatttacttggggtgaaacaccagctaaggctgtttataatgctaaagtcttagaagttgtggcggaagaagactatcatactttgcaattaacacgtgctaattgccatttaccacaatacctacttgataaacactattatcgtaagcatggtaaaaatgcttactatggtcaaaataatgctcattcaaaagatcatgcaaagcgtgcctaaaactaaggggtaaaaaatgcttgaaaattatttttttgattttgataaaactctggctagttcaggtaaggcgtcattgattgcgacaaagcaggcatttaagttaaataatttagatgagccagatgatgatcaaattttagattttatgggtattcctgctgatgtttcattccctaaaatggctaatagagaattgtcagaaagtgatgcgaaaaaattagttgatacctaccgtaatatttatggaaagtatgaaaaagaaaatacacatttatatcctggaatgcgagatgtactagaggatttacagcaaaaaggtaaaaatttatttgttgtatccagtaaaagtcatgatattttaaagagaaatttagataatttgaaaattactcaatattttaaagactttgtgggatgcgatgaggttcagcattataagccagccccagatggtattttgatacttttagacagatacaatttgaataataaacaaagtgtaatggtaggggatgctcgttatgatttgcaaatgggcaaatcagcgtctgttaaaacttgtggagcagcttgggatgcttttagtgtggatagcttaaagaatgaacatcctgattatttgctatttcatgtggcagaattaaaaaatattgaatagagttcatatattttaaaattggatggtatcaattttgaaagtagttgaactctttagcaaaaatgatattattaacttgtaagggaaaacggttacataacgatggtctataggaggacatcatggctgtagattacgattcaaaagaatatttaaagagcgtcgatgcttattggcgtgcagcaaattacttatcagttggtcaacttttcttaatgaaggccccacttcttaaaacacctttagttgctgaagatgttaagccaaagccaattggtcactggggaactattgctccgcaaaactttatttatgctcacttaaacagagtgttaaagaagtatgatctggatatgttctatattgaaggttcaggtcatggtggtcaagtaatggtttctaactcatatctggatggttcatacactgaacgctatccagagatcacccaagatgaaaagggtatggctaaattgtttaagcgcttcagtttcccaggtggtgtggcatcacatgctgctcctgaaactcctggatcaattcatgaaggtggggaattaggttactcactttcacacggtactggtgctatcttagataatcctgacgtcattgctgctgttgaaattggtgatggtgaatcagaaactggtccacttgcagctagttggtttagtaacaagtttattaatccaattaaagatggtgcggtattaccaattttgcaaatcaatgggtttaagatttctaatccaactattgtttctcgtatgagtgacaaagaattaactgaatacttccgcggcatgggctgggatcctcattttgtttcagtctttaaaggcggtcgttttgacggtgaaaaggatccaatgcaggttcacgaagaaatggctaagactatggatgaagtcattgaagaaattaaggctattcaaaagcatgcccgtgaaaacaatgacgctactttgccacattggccaatgattatctttcaatgccctaagggctggactggtccaaagaaggatttggatggcaacccaattgaaaactcattccgggctcaccaaattccaattccagttgcacaagatgatatggaacataaggaaatgcttgaaaaatggcttaagagctacaagccagaagaattattcaatgaagatggttcacctaagaagatcgttactgaaaatacggctaagggtgaccacagaatggccatgaatccagttactaatggtggtaagaaccctaagcgtttgaacttgccagattaccgcaagtacgcattgaagtttaagccaggtcaaatggaagcacaagatatggttgaatgggctaaataccttagcgaagttgctgatcttaacccagacacattccgtggctttggtccggatgaatctaagtcaaaccgtttgtttgcacttcttgatgatcaaaagcgtcaatgggaaccagaaattcatgaacctaatgatgaaaacctagctccaagtggtcgtgtaattgattcacaattgtcagaacaccaagatgaaggattccttgaaggctatgttttgactggccgtcatggcttcttcgctacttacgaagcctttggccgtgtagttgattcaatgcttacccaacacatgaagtggttaagaaaagctaaggaacaatactggcgtcatgactatccatcacttaactttgtcgcaacctcaactgtcttccaacaagaccacaatggttacactcaccaagacccaggcatcttgactcacttatatgaaaagaatcgtccagaccttgttcatgagtacttgccatcagacactaatacgcttttggcagttggcgacaaggctttgaaagacagagaatgcatcaatgttttggtaacttctaagcagcctcgtccacaatggttctcaattgaagaagctactaaattagctgataaaggattgagttacattgactgggcttcaactgatcaaggctataagccagatattgtatttgcttcaactgaaactgaaccaactttggaaagtttagctgcaattgatatcttgcacaagcgtttcccagaccttaagattcgttacataaatgtagtagatgtgatgaaattaatgagtcctaaggataataagaatgctatctctgataaagagtttgatcgcttattcccaagtgacattccagtaatctttgcatggcatggatacaagactatgatggaatcaatctggtttgcaagaaaccatcataatatacatattcactgttacgaagaaaatggtgatattactaccccatttgacatgcgtgtcctgaaccaccttgatcgtttcgacttggctaaggatgctgttgaaagtattccatcattggcaggtaagaatccagacttcatcaatgaaatggatgacttgcttgctaaacaccaccaatacattcgtgataatggtaaagacattcctgaagtcactgagtggaagtggacaggtcttaagtaaaaaataaagtgtctgggaaaaaactaactcttagaccataataataggacgatcaaaattcttaagtgagttttaatcgtccttttttcttttaaaattaaataaaaacggtcttttggtcattttctgttccaatatttgcttatattcatcatcatgaaggctattccaacatcggtttcaactttctttttgcctcttagatgtgtttgccttcttcgctttgaagaacttcttttgctttttcttttaaatactgccagttagggttatagcgtacttgacgctggcgaccgctagctgtcttagctaattgttccagttctgacgtaagcttcaactgcctggcccttcagcttatcatgatacttttcgacagccttgcgccaaacaaaagtgtagcggttagcatcagcttcaattttagtgccatcaataaaaacagccccctcgttgatcagccaacagattggtaaagtagataaagctcttcttaaccagttcattggcatgactgctgtgtggtatactggtcgacctgttttagcagggtgtaaagcagaatagcttctggaatcgaatccacaatccagctgatagcattagccaagtgattgctgggaatggtaaaatccaaattgagtgttaaagctgtttgacctgtgatatgatttttgtacatattagtttccacctttttgttttaatgaaataagaggccacaaatgatcacattttttatggagaaatttaaaatgttaaattttagatcatatgaagacgcagatttcgaaaaattatgcaacatccacgatcaagcgcgaaagcaagaattaaaatttgccaatcttgaagctgcatttattccattcaaaatagcatcaaagaaagagcaattatttgaagactatcaagttcctgaattgtcaaattaagtgcaacagttaggttatgaagagatatattgcttgaagagttcctctgctgtgtgatattggaggattcggcgatatttgtggttaatggcatcagttgcctgttgaacataagcttttgacttgtctttcatgctcttgcccttagggaagaattgacgcaaaagaccattgcagttctcattggtgcccctttcccatggagaatatgggtgagcaaagtaaatctggcagcccttgatcttggtcatatccgcaaactcagagccattgtcaaacgtgattgatttaaaccaggcaggatgtctgtcaatctccttttgaagcagcctttggcatgtgcttgcccgatagtcaggaatcttgataactacttcaaagcgtgtggttctttcagtcaaagtcattaaagcaggctgattcttgcgtctgacgcctttaaccagatctccttcccagtgcagcggagcttttctgtcttcaacctccttaggacgctgttcaatggaattgccaagatgcttcttgtgcaaagcgtgaccgccatggctgtgatgacgcttgttcctgcgtcttttgagcttcataggcagatcaatattgcttatgtccagcaagccctgatcaatatagcgatagacggttggtgtgctgggacaagggtagcctggcatagtccttttgaattcaccaacgaactcatcgatgctggtggcatcaaatttagctttaaagcgtctggagagcattctcaaaaagacagcataatgcttcaatggattgcgctgatagcagtttttgcgacgcttctcataataaatctgtgcagtatcagcgtaatagtgctcatacaataaatagctgctgtctctttgcaggacgcttccgcgtttgatttcgcgactgattgtcgacttatggcagccaacttcttgagcgataacagtacgggaagttatgccggaatccagcattgcttgaatttgtccacgttgtacgctggttaattgatgatagtgcttagaaatgctagaatttgaattggtcatgaagatcttcctttcttgatttttcgtcacttcaagtttaggtcttcatggcctttttgtttaacacttagtgttgcacttcaattttaaatccgggagactatcaagtttacgttgcaacaaaagaaaataaagttgttggttttgtcggatttaacgaagaagagcttggctggctctatgttgatcctaaagttcaaggacaaggtattggtagtaaactgattgattttacgcttgaaaattcgaccaggccattttatttagaagtgcttgagggcaatcctgcacaaaagctttatctcaaaaaaggtttcataacaattaaacatgaaagtggcaagatgccaggtaatgaatcatttagtgttgaagttgacctaatggaatataaataaaacatcccaatcaggtgtgttttttgttagacttataaaaaatgaagctagtcaataaagtattgtcttgtcattagaaagtactacatatgaagtatatttcatgaagtccgcttcatattttagggatgatgattatcaataataaaattaaggaataccgcaaaaaacatcaacttacacaacgcgagttagctgaaaaagttggtgttacagaacggacaataatttcattagaaaagggtcggtacaaaccatcgattgttttagcttataaattagtacaattttttgagacagatattgaaactttattttgcttaaatgagtatgtgaagaatgagcaagccaaaggaaggaatgcttacaattctttttgcgattctatcagtcatacagctcttagaattaatttatgatgttgcaaatagaaaaagcgtcaattatattcaagatgttatttggttaatattgggcatctgtttgacagtcggttatttctatagtactaaatatatcggtatagccaagattgaagaagatgatgaacgcgataaatttattcaaactaaaactaataatcaagcattcaatattttacagtgggtcctttttgttttaggtgcagtaacgataataattgatgttaatctcggccaaatgggattagattctcgtgcaatggttattatagttgtaggcgttgtattaatctttttatgggcattttcttggattttgcaattaatcttaatgataattaattatttttgcaattgagactacaaaaaataaagcgactggattagctctggtcgcttatttaaattttagtatggcatttctttaaaaaattagaatatcgatctttttcaccgtttaccttccaatattaaccattcaccgaaatttttaaatttaaaatattttttcgtctatactgataagcaagaaaggagaaaaagggatgaaggtaaaatttaacattgataatcaattagcgggagaaagtgctgaattttggttaaaaaagatgactaataaattcagtcaattgggtaaagaattaagtggtgaacaagacacgatttggtgcagttatgatgatgaaattattcctgtgaagtttgaaaatatttatttaattcaagtcgaacaagagcaaactttaatttatgacaaaacacagagttacaggtataaagggcaattatatcaggttaaaaatattttgccacataattttttaatagcgtcaagaagtgcaattattaattatcaaaaaattgatcatttggaagttatggatggtggcaatattgatgtcattatgaagaaccaaatgcgggtacaaatttctagaagaaaaattaaagacttgaaagagaggttagggttatgaaaagaatggaatctttcttggtaagtggaataagtggcatgggaattggattaacttggtattcaatagtaactttatttcaaacgggaacgaattggaaaaatgctcaaattccgtttacaagtttgctcttttatttgattgtctcttttgtgatgggagcatttttcaatttgacaggattgatttttgaacaaacgcaatggtcactacgaaaacaaattattgtaaacttttttgttagctatgttgccttttttgcttttgaattagtgattaatgatttggctttatcggttcatttcttcttagtaattactggagtatttgtcttgatgtacttgctcgcttatggtttgtactttttacaattattgcgagatgttaaacaaatcaatcaaaaattgaaagaaaagtaaataatcaaaaacgatcaagcctaaaaatcttgatcgttttttcgttggttagataaaaattataaactgtcttgaatattatcagctaagtagtcataaagcataccatgctttaattgcttagtatcaactcccaaagcttcagcaattgcataggcaaaggcccaagcggtagcaggaccacggcttgttaaaattttatgctctttatcagtaacggtgattttctctgaaaaatgagcacttggggcatcttttaagcattcttcttcaatgcctggataacaagtgaagtccgcatctgccaaaacaccatagcgagcaagagcacgtggagcagcacacattgcggcatcccacttgccagcttcatgacgcttaatcatcagatcacgtaatttttcattatcgcgtaagttagcagaaccagtcatgcctcctggaaaagcaaccaaatcataatctaataaactgtcatctacaactttgtcacaagtgatttcaatatgatggtcaccatctacttttttacttattaaacctaccatatcgcattcaacgttaagtctacgcaatacgtcaacaacgcttaaaccttcgacttcttcgcaaccgtctgcaaatactacagcaacttttgtcataaaatcatcctttctataactattttaattatctacttacattagatctaagtaaaatgaaagatctgctaatttgcttaaatgaagagtaggatgaggtgaaattggtatcttgtcttttttaggtgccagccataatgattttagattggcattttctgcaccttgaatttcttcatccagattagttccaattactaaaactgtgtctggatcaatatctggattgtctttcagaatcttaaagaaaatatttttgcttggcagcttgtccgtaaaatcatcggcgaaataagcattgtcaaatgaagaaagcaattctgtaggtgcaaggcgcggttcgatttgagtgcgcttttctttagcaagcaaaatcaaatgcagcttgccactgacttcatcaataaagtcgatggcgcccttgactaacctggtttgatccttcattgcatcatcaaaaacagttcgcgttttagaaagatcttcttttaaaaatgtagataaagctaaatcgatttgatcattgctagataaatttttaaattctttttctaagctagtgtagcgtagtcgctcagctggtccccagtctaccccataatgttttaaagtttgccgcagcgcagttttttctgctaatttttcatttaataaactgccttcgggaataaaaattaaagtttcaaatgtagccatgaataaacttcctttgtgttagttcctattagaattataatgaactagacaattttaggaaaggaattaaaaaatgacaatctggaccgtaattttcttattattaggtggtgttgcaggtggcttattatcgtcagtggcctcaatggcatcacttgcatcatacccagttttgctagcagtaggaattccaccagtatttgctaatgtaactaatgatgcggcgctaatttggactagcatcggttcaactgtatcttctactaaggagttaaaaggacattggaagcaagttttgttctataccatttttacagttgtgggatcaattttgggttgtattttgcttctatcttttcctccaaagatttttgaaaaagcagtaccattctttattgctttctcaggattgatgattattgtttctggtaaacaccatagtttaaatactaagacacagcctacttggcttaaaataatttattttctcgcacttttagtcatggggatgtatacaggttactttggtgcagctggtggagtcatcgtactagtacttttaacttacattaccaatgataaatttattgttattaacgctatcaaaaatgtgatttgtggttttgctaatttagtagccttgattatatttatgtttacctctcatatttattggcttcaggcaattcctttggcaatcgggatgttcattggtggctatattgggccagctattttaagacgagtaccggaaaagccagttcgaattttcattgcaagcttggccttcattcaagccggttacttcttttatacggcatatctgcaataagtttggtacaatattaagcaatgaaaagggggctaaggttgatggcaacagaagtttatttggtacgtcatggtgaaacaatgtttaaccaattggacaaagttcagggttggtgcgattctcctctaaccgtgaaggggattaacgatctaaagagaaccgctaaggccttgagtcaagttcactttgataacatgtattcatcggatttgaagagagcaattgataccgttcacttgatgaaggatgctaatgtggtctcggatattggtaaaattaaaaagctgcctgaatttcgtgaggtcttctttggaacttttgaaggcgatgatattaaccagacttgggaacaagtagcactagccgcaggaattgaccatgaagatgatgtaactaagatcatcaatcaggtaggcttgcgcaaatttcgtgcagcaacaaaaaaggctgatccgcgtcatttagcggaaaatcaggatgagttagatgagcggatggtacgggcaattgacgttttgcgcgatttaactaaagatgaacaaagagttttgttagttagccatggtgactttattaaaactttgtccataaaatattggaataagagtaatggcaaaaacgatattgtttttccaaataatgggagcgttactcgtggaattttgcacgatgacggttcatttgaaattgttgattataatgtagatgctgaagagctataaaagtcctactgccgaagtagggccttttttggtacactgataacgaaaggaaaatattttatgaataaagatcatacaactaagcgttatgtcttcgtaactctactgaatgttgttattactattgctgaatttataggtggtattttttcaggttcattagcactgctttcagatgcatttcataatctgagtgatgttggtgcaattattttatcttttgtggcgcacctgattagtcgcaaaagtcgtaatcagtttaagacctttggttatgaaagagctgaaactttagccgcttttactaatggcgttatcttgatcgtgatcagtgtggttttgtttgttgaagcaattcaacgtttctggaagccggaacatattcacggtggcattatgctgattgtctcgattattgggctggctgccaatattatttcaatgctagcaatgcatagcgattccaaggctaatttgaatgtacggtcaacttttattcatatgttaagtgatgccttgtccagtgtagcggttgtaattggtgcgatcttcatttacttctggaatgtaacttggcttgacccagttttgactattttagtttcaatctttgttttgcatgaagcttatgaaaatacaatgaaagcagccaatgttttgatggaatctaatcctgatatcgacttgaatgaagtgaacaagattgttttatcgttccccatagttcaaaatatccatcatgtccatgtttggcgctacagcgatgactttattatgatggacgcgcatattaatgtagccccaggattaagagccgatgaattagagcagctataccaagatattggacaggagttacaaaaagagttaggtattaatcatattaccttacaagcagagtgcgagcgtggcagaaaagacaagatgatcgttccaggccacggtattaacgaagattaggtgaaagaatgtttaatgttaatatttttacagcgattattgtattgattatgggtatttatgacatgtcctatgcttttaataggcgtaagcaacctaccaataaaggcggcattagagcctttatggctttaggaattatcttcacgatcgcaggaattgttatgatcgttagagtattaatgaagtaaggaatcttagaatggctaaattagtattagttcgacatggcgaaagtgtggcaaatgctgccaatgtttatactggctggaacgatgttccgttgactaaaaaaggtgaagaacaagcagaaaaagctggtgaattgattaaaaccatttcggattttgctcccacccacattcatacttcagtcttatcccgtgcaattgtgacagcaaatatagtagccgatgtctgcaatttattatggctaccgatgactaagacctggcggctgaatgaacgccactacggcgctttaaggggccttaataaggacatttcacgtaaagtatttggtgtggaacaagttctattgtggcgacgtagttttgattcagttccacctaagcaggggtcgccaatgattgatcgccgttataagcattttgatcagcatttgatgccacgggcagaaagtttacatcaaactcagaaaagactcatgccatattattatgatcatatcgcatctcgattgatgaatggtgaagaccaactgatcgtagcccacggttcaagtttgcgtgctttgataaaaaagctagagcagattaatgatcatgacatcgtaaaactggaagttcctaatgcggaaccgattgtttatactatggatgatcacttaaagattattaacaaacaaattttacgtaaataatgttaaaaatgcaccttagtgcatttttttaatgctctaaatgaggttttacacatatctatggtaaaatctattatgatttctagtatatttagtttggagtattaggcatgcgtaaattatttttattacgaggtgcacctggctccggtaaatcttcttttattactcgccatcacttaaatccttatgcgatcagtcgtgatcaaattaggctactattggcggatttgacagtttactatcaagaggatgcggatgttttacaccaagtcattccgcggcacgtaactgtgcgtactgagcaaatggtggatcaccttgtagaacacaagatggaatatggggaaactgttattgtggatgggacgcatatcgttccaagtgcgattgaacattttaagccttgggtagacaagtatcactatgaatgctttgtagtagatctgatgcaacatactaccttagagagtttgcttaagcgtaatcagactagaatgcattacgattgggttaagcctgaagtggttaagcaaatgtatcgttcttatgaagcacatccagaagtaccatactgggcacataaagttgtgccaaatcagatggatcatgcgttgtcacagcgtgagacaaatttagatcgttatgctcatgtgattgcggttcctgacatggtagatgaagaagattttccacatgtgcatatctcgaacttttatttttcatttaatgacaagtttacagaaaagtatggaacttatcgaaatgtagtttcaattgctaaaactgaagatgaagcagttaagcagttcaagttgccatattttgtctttaagtttcatcacaagcactttttgatttcagcttatccaattcgaaatgagatgttggatccgatcagaaaggttaagggagtttggacatattcaactggtttgtataatgtagcggattttgtgaaagaatttccggaaaataaaaagcaacatgtgcatcagttcaacttaagtaagttagatccaacccgcttattacatatttggtaaaaaagacgtagttagaacattttatctaactacgtcttttgtgtaatttacttatattttgttttacttcaatttgccggccttagctaaaacttctttagccttttcaagtgaatggtgttcttcacgataacgcttgatgtcatagccatcaacatcggttaacttgctaagtctatcatcaaggtctttgaattctttttcaagatccttaatgacgccttcttcatcttcaacgtaaacatactcattttcatcagctttggcatcaatcttagcatcgtattcgccgacttttctagcatgtttcaaaatagatttaatatccttaatcgtttcatgttgtgcagtacggtgacgacgatcaggtactgaatcttcaattctagcgaagtggctttcagcatcactaattttctttgaaattctatctaatgcttttaattgtctttttgaatagtctgtcatgcttttttcatcctacgtaaactttaccatttgaatcctctctaccgaattcgccttcgttgtaggcctaatatttttgggatacaagaaaggacacttgaagttgtaaaaaaagtgtcagaaatttctttccgacacttaactatttgattatagctattaatacttaaatgctaaggcacccattggatcccatggcaataattgaattgggttatctttgccttcatcgtaagccttcttaagatcttctggtaagaatttcttgttgataactgcttggtaaacaaatgaattaaaccaagaatcactcattacgaagtaacccttaaagccaggtttttcaccccatgagttttcgatcttccatttagttggcttaccgtcaacgatatcaacaccggtaatcaccatggcatggtccatcatgctttcaccagaatcaagcatgtcggctttagacatagtgaagtcagcatcaaataattgatcacggcggtaaaggttagtatcaagaagtccagcacggcgttcagaatccttaactacgtttgaaccgaaccaaacaacttcgccactcttcaattgtttaatgattaagtccttcatttcatcaactttaaggtttaagtggcgaacttggcgaccgccttcaacgttacctaagtattcaactgagaataccttgtggaaaggtttgtcgttagttggagcattgatagttgagatatggtttgctaaatccatgccaacgtacttgtcaaagaattcctttggggtaatgtccctgtcaatatggtaattcttgtcatcatcgcggtattcgaagttgaacttctttggtggaacacccaatgaagtagccaaaatacggaagacatcgtttagcatttcttccttgcgagcttgtacttcatcttctgacttgccatcttgaactaatttacgtaactcaagaccatctttacgaagcaaagtatttaaagtgtcgtttaatgcacttgaattagtagcattagcagtttctggataaacactcttaggaacgataccatatttttcaataataccgcaaagcatgtcccattgaccgccgtcttgttgaggagtcgcaaataagaatgaaactttacgatcgcccaagtccttatcagcagttgcgatcacattttcaaagaaccagttagacttttcaaatttatcccagaagttagtgtaattttgagataattcgaagtcctttaacttaaatttcttttgtaatgggtgacgcatagtgtttaaagcactgaacatccagcagcgaccagactgcttttgatcggcagggttacctgtatcaatttcgattgagaaggttggatctaggtcgatcttagtttgtaagttttgactagctttgtagataccgttttcttgagcagcgtgactagccacatcaaaaacagggtggttagctaagtcttgttcaaatttattaatagtatcattgttgatttcttttaccataaaaaaaatcctcctttataagtacttaaattaattttatcttattcaaaatgagtcgtctaataatcttatcgattaaatggacgatgataccaaattttgtgaaattgaggatgctgggtgaagtagtcaatgatcataggatcaagcggccaaatgggtaagttagtttcttgagctaattgccaaactttttgcatttgtttttcaagcaaatccttactattaaattgtggattaataaaaaaatggttcattatccagacattactgtctttgcgagcgattttatctaaggtaacgctagataatagtatgtcttcttcattttttatagtgaaaatttggtgcgcatcttgcttattcataaaaaattcctttttaaaaaaataatctcatttttttgcgtaataaataatagagagctatttattttgtgttgactaaaaacattgtaaaatagataactgtcaaaataaaagataaatggagctttggaatgaaaacacgtggatttgaagtagtcaaaaagtatcaagatcaggaaattaatcttcctcgcagacagaccctagctagtgcaggctatgacatcgaagcggctgaagacattactatccctagcatttggcgactaaattttgtgcgaatttttaggttgattagaaatggacaccagctgtatgagcgcgactatgagatggcggatcagattttaaagccgttgttagtgccaactggacttaaagcttatatgccagaagatgaagtgttgattttagctaatcgttcatctaatacttttaagcgtaatctagctttgccaaatgggatcggcgttatcgatgcagattattacaataatcctaacaatgagggcgaaatttttgtacaaatgattaattatggcgtacggcccttgcacatcaagaagggagaccgtattgctcaaggcatttttatcaaatacttgaagaccgacgatgatgatccaattagtcgaaaaagagttagcggctttggatcaactaatgaaaagaagggtgattaatggctagagtaaaaacacaatataagtgtcgttcttgcggctatatttcggcaagctatttaggccgctgccctaactgtggtgcttggaatcaatttgaaaaagaaactgaagaagtgcaaaagcgttctactaaggcaactgctagtcgtttgattcagaagactggattaaatgaaccggtaaagctggataagattaaagctgaaaaagaagaacgaattgtcactaaatctgaggaattaaaccgcgttttaggtggtggtattgtgccaggctcactagttttaattggtggagatcccggaattggtaagtcaaccttgatgttacaaattatgagtgacttatctgaaaaatataaggtgctttacgtttcgggagaagaatcagctaaccaaatcaaattgcgggctgaccgactgggtgtaggtcaaagtaatatgctcttatatccagagactgacatgcatgatattcgcgaacaaatcaatgatgttaagcctgactttgttgtaatcgactccattcaaactatgaatgaaccaagtcttgattcgatgactggctctgcctcacaggttcgtgaagtaacaagtgaattaatgaaaattgccaagatggatgccattacagtttttgttatcggccacgttacaaaagagggtgcgattgctgggcctaagatcttggaacatatggtggataccgttctctattttgaaggggatgaacaccattcttaccgaattttgcattctgttaaaaaccgttttggagcagcaaacgaaattggaatgtttgaaatggttaatgaaggcttaagagaggtaactaatccatcatcaatttttctggaccaaagattacctaattctactggctctgctgtggtggtatcgcttgaaggaactaggccacttttagcagaaattcaggctttggttactccgacagcttttggctatgctaaaaggaccacgtcaggtattagttttaacaaagcttcattgctgctagcggtgcttgaaaagcggggaaacttaatgttgcagaatcaagatgtctatttgactgcaactggtgggattaaattgaatgaaccagcaattgatttagcaattgccatggcagttgcatccagttataccgataaagaaatttcgccgacagattgttttgtaggcgaagtgggcttaactggtgaagttcgccgagttgataaaatcgatgcacgagtaaaagaagcggctaaagtagggtttaagcggatctttattccacggcataatatgtattctggattaaaagatcatggcattgaggtaattcccgtttcgagtattccccaagctttaaaattagtttttggctagcattaattgaattcttactatataacgagtaaactaagattgtttgaatttactattttttgaaagaggcatgaattttggctaaagaaaaaatccgtgtaagatatgcaccaagtccaactggtcacttgcacattggtaacgcacgtactgcactttttaactatttattcgctcgtcataacaagggtacgatggtcttgagaattgaagacaccgaccaaaagcgtaatgttaagggcggttctaagtctcaaatggaaaaccttcactggttaggaattgactgggatgaaggtcctgataagggtggcgactatggtccttatcgtcaatcagaaagaaaagaaatttaccaaaagtatattgatcaattgatcgatgaaggtaaagcatattactcatacaagactgaggaagaacttgaagcacaacgtgaagaacaacgtgctgcaggtgttgcacctcactatacttacgaatatgagggtatgactgctgatgaaattaagcaagctcaagatgaagcaaaggctaagggcttaaagccagttgttcgtatccacattccagaaatggaaacttattcatgggatgatattgttaagggacaccttgagtttgaatcagacactattggtggggatttcgttattcaaaagcgtgacggaatgccaacttacaactttgccgtagttatcgatgaccacttgatgaagatcactcacgtacttcgtggtgatgatcacgtttctaacacacctaagcaattagttgtttatgaggcacttggttgggaacctcctaagtttggtcatatgacattgatcattaattcagaaactggtaaaaaactttctaagcgtgacgaatcagttcttcaatttattgaacaatatcgtgatcttggttacttaccagaagctatgtttaacttcattactcttcttggttggtcaccaaagggtgaaaacgaaatctttaacaagcgtgaattcatcaagcaatttgaccctgcacgtttgtctaagtcacctgctgcttttgaccaaaagaaacttgaatggattaacaaccaatacatcaagaaggctgatcgcgacactttgcttgatttagctttgaacaacttgcaagaagcaagtcttgttgatgagcatccaacaccagaaaagatggaatgggttcgtcaattggttaacatctactcagtacaaatgtcatacactaagcaaattgtagacatggctaagattttctttgaagaagctaaggatctttcagacgaagaaatcgaagaaatcaagaatgatgatggccgtggtgtaattgaagaattcaagaagcaattagacctcatcccaagatttacttcagttcaaatcatgaacgctattcaagcaactcgtaaggctactggcatcaagggaagaaagctctttatgccaattagaattgctaccacgcgttcaatggttggacctggtattggcgaagcaatggagcttttaggtaaagaacgtgtattagaacacattgatttaaccttgaagcaaatgagtgctaataatctttaattagataaattgaaaaagaggctgcaaataaatgcagcttcttttttcatctgctaaaataaaaattagttattttgacagaagggacaagtgttagccgtgagagtttataatacactgacgcgtaaaaaagaagaatttaagccattagttccaggacatatcagcatgtatgtctgtggaccaacggtgtataactatattcacattggtaatgccagaagcgcaattgcttttgacaccattagacgctattttgaatataagggttatgacgttaagtatgtttctaactttactgatgttgatgacaagatgatcaacgaagcgagagctgaaaaaacgactgtacccaaattggctgaaaattttatcaatgcttttttggctgatacgacagcgctaaacattgagccggcgactttgcatccccgtgcaactcatgaaattaatgacattatcacttttgttaaaagcctaattgacaatggctatgcttatgaagtagacggcgatgtttattatcgtgccaaaaagtttaagcattacggtcagttaagtgatcaaaatattgaacagcttgaagagggtgcttcagagcacattaacgatacagaacaaagccgcaaagaagatccaatcgattttgctttgtggaaggcgcaaaaggaacccgatgaaattgcttgggattcaccatggggcaagggacggccaggctggcatattgaatgttctgtcatgagtaccaaatatttaggcgatacgatcgatattcatggtggtggtcaagaccttgaatttccgcaccatgagaatgaaattgcacaaagtgaagctaagaccgggaaaaagtttgttaattattggctgcataacggttttgtaactgtcggtaaagatcaggaaaagatgtctaaatcactgcacaatttcgtaacagtgcacgatattttaagggaagttgatccgcaagtactgcgcttcttcatggctagcgtacaatatcgccgccaaattaactattctgctgaaaatttagcacaagcagctacaattttagatcgctttaaaaatactttgactaatattaattaccgtctagaagatgatacagctagtgaagaatcagccgaattagcacaggcgattatggcaactaacgaaaaatttgaacaggcgatggacgatgactttaatgtccaaaatgctttaacagctatctatgatttgttgcctgtagttaatgccaacgctaatgctgctagagctgacaagcaagaattgcaaaagtttaaagagaaattagctagttggttattagtgtttggcgtggatactaataagctttgcgttaaaaatgctggctccaatgacgatgaaattgacgctttagttaaaaagcgtgatgaggctcgagcaaataaagattgggcaactagtgatcaaattcgtgatcaattaaaggaaatggggatcactattcaagataccccacaaggaactaggtggactcgtgactaaaataaaaaaactaacggaagaggatgttaatccggatactttaaatggacaaactttagcctatttaggggatgcagtgtatgaattaattattcgcagacacctagttaaaggcggtatcgttaaaccacaagtattgcagcgtgaagcgactcactatgtttcagctaaagcacaagctgcgttggtaactaagatgcaagatgaagaaatgttaacggatgatgaattagctgcttttcgtcgtggacgtaatgctaaaagtcatactaaggctaagaatactagtttgaaaacataccaattatcaacaggctttgaagcaatgattggttatcttgatttactggggaaaaatgatcgagtggcagacttaagcaagtggtgtattgatactgtagaagaggacgggctgaaaaattatgacttcaaataaagattttgtctttggacgccatgctggacttgattatttaaaaacacaaagtgccgacaagattaataaggtttttttacaacacggtgtacaagaagaatttgctaatcaagtttatagtttagctaaaaaaaagcgtttagttgttcaagacgtgcctaaaaataagcttgatcgtttggttgctggtggcaatcatcaaggtctagttttagcaatttctagctttgaatatgcagatttaaatcaattgctggacaagtatgatgcggaaggtaaagaaccatttttattaatgttggattctattgaagaccctcacaatctgggatcaattttgcgttcagccgatgctactggcgttgacgggatcattattcctaagcgtcacgcgactggcttaacttcggtagtagctaaaacatctacaggagcaattgattatgtgccagtagcgcgcgttaataatttagttcaaactactaaagaactgaagaaacgcggttactgggtctttggaactgatatggcaggtactgattatcgtgaatggaatgcccaaggcaagactgtactcgtaattggtaacgaaggtaaaggcatcgccccattacttaaaaagcagatggatcaaactattactttgccaatggttggtcacgtacaatccttaaatgctagtgtggcaaccggggtattgctttatcaagcttataacagtagaaatccattagtaaaataaacagaaagtagacaaaagtgtgagttttgtctacttttttagatacataaagctcatttctgtccattaaacatgtgttttcttctcaaactcaggggatagtctgtattctttgaggtggaggataaattgaatgattaatgaagagaagctgattaagaaagtacgggcaggagatgaccaagctttagaaaaattgtttcatttatatgagccgttagtaaattcaatcgtgaagcaattctatttgcatcattatgatcgtaaagactgggatcaagaggcaatgattgtttgttatgaagcagcactagttttctcgcctaaaaaggggaaatttagcagtttatataaaactaaattgtttaatcatgcacggaccttggtacgttacaatatggcacgtcgcaggcaaatctatagtcaatcgattccgctagaaaaggcggacattcaaggaagcgtgaatgaaccatgccgctctgaattatcgattccagttgatgagacttacaataattttgttaatagcttgtcacacgttgaattaattgcattattaaccataattggcgagataagtacagagtatgcgattgatcatctaaatattgaagcaatgaagctggtcagagctcgagcacgaactttacagaaaatgcggaaagtgcttttttgatagctgatcaaaagaaagtgcggtataataagtaatgtagaatattttaggaggtaatttaagatggcagacgaaattattaagactgcattgttagaccgtcacatgaaggaagcttttgactggagtgattcagatatgccagttagagatgccctttgggactactttatggaaaagaatggtagagataccatgaagacggaagaagatatgcttccatttttgaaagactcagacgataaaatcgaagccttcgttaacgaaaatcttaagaagtaaatccgactaaaaaacaatgttctacgcaccgtggtcacgcatagttttgaccactaagacagctaccttctccggtggctgtttttttatactaaaattaagaaagaattttaaagatgaaatatataattggcatagacataggaactactgcgactaaaggtgtgttgtatggcgaagatggaagtgaagtagctaaattggcaatttcctatccattgattcaggaagaagcgggacaggctgaagaagatccacagcttatttttgacgcggtacagaaaatgatttatcaattaagtcagaaagcatctggtcaaattttggcaatttcttggtctagtcagatgcacagcttaattggcttaggtgaaaataatgagttactgacaaacagcattacttgggcagataatcgtagtagtgatgtagtgcagcgggcaaaaaagtcgggctgggcaagaatgatttatcagcaaacggggatgccgccacatccgatggcgccagtgtataaattgctgtggcttaaagaagaacagccaacactttttgcacaagtaaaaaaatggattagtatcaaagaatatattatttggggcttaactggaaaaatattaactgatacaactatggctgctggcagtggaatgatgaatttaaaaacgctgacctgggatgaaaagatattggctcagattgggctagatcaagttcaattgccgacaattgctgatcaacaatctactgtgggtaaaattattccagaatatcgtgctaaattgggtttaaatgatgaaactcaaatcgttttgggcgcaagcgatgggtatttgtcaacgattggtgtcggcgttttggatgagaaagattttgcattgaatgttggcacttctggtgcggttagagtaattgcaccgaaggcaattgttgatcaaaagaatcgctttttctgttaccctgttgacgccaaacattatttgcttggcggccctgtaaataatggtggaattgtgttcgattgggccagaaaaacaatttttggcccagatgaaacggcagaggacgtcttaaatgtggcacaaactgctccggctggaagtaatggattgttgtttcatccttatcttggtggtgaacgagctccaatttggaatgctcaagcacgtggatcttttgttggcttgacgcgaaatcacactaaaccgcagatggctagaagtgttttggagggaattgtttttaacttgcttggcgcctctcaaggattgcttgatcaagtgggacagcctcaagctttacgtgttactggtggctttgtgcaaagtgattttgttagacaattaatcgcggacatttttaacttaccagtgattgtaattaaaaatgagcagtgtggtaccctagcagctatgtttttagctaaaactgcattagaagataagccagacctggaaaagattaaaaagcgtactgccgaaagccaagtttattttccaaatccccaaaatgtagcgatttatcaagaattgattctcgtttatcgaaaaattgagcatgaacttgaagcctcttatgaagatttggctcagtttcaagataagcatccacagaaatttgagtaaaacaaaaaagacgcattgcgtctttttttcatagattgattaactattaagcattttcaatatcttcaacaatctgatcaactgtcatacgattgtctttcaaaatttctttcaaaggtacttgatcagtatagacacgtttttggccgtagttgagtactttaatatccttgtcgccaaggtaggaagctactttttcaccaaaaccgccgtccaaaatattgtcttcaatagtaacaataactttgttttcttgagtcaatttgtctaaagcggcagtgtctaaaatattagcagaaactggatttactaagctagcacctgtcttttcagccacctttttacctagcatatcgtacatatcacctaacgctaaaacagcaacatctttacctggtttaatgtcgtacttgatttctgaatagtcaacagcagtaatttctttaccttcaggaacatctttggtaggcatcttaattgctacaggatgcttcttttgcttaatagcccattccatcattgccttttcttcggctaagttagttggagcaaggtagatccagttaggcaagttagaaatcattacttgatcaaacacacctaggtgagtcttacttgtgccagaaatgccaccaccagcaaccatcattacaactggtaaatcattagcggcaacatcgtgtgataattgatcaaatgcacgttgcaagaaggttgaattttcaaataaaactggagttgcaccttccttagccattccggcagcgaaggcaacggattcttgttcagcaattcctacatcatggtagttttcaggatatttgtttttaattctgtctaagccgaaaacgccgggaattgcggcattgatagccatgatcttctcaccattattgatgtgatcttcaagaacatcgagtgcaatagagctagcggtcggaccttcaggcattgctactgtcgtcttgtcagtctttaaatcgaatggcattacccagtggtgtgcttcttcgttgtcgattgcaggttgataacctttgcccttgagagtgttgatatgaagcaaaatagggtgatcaacatttttaactgctttaaaagcatcgatcattgattggatatcattaccatctgcgacataacggtaatcaaagcctattgcagtaaatggattttctttggtttcaccattagaatcacgtagtttctttaaagcagtaactaagccaccgacgttatcatcaattgacatttgattgtcgtttaccactacaactaagttatgcttttcaattgcagcgttgtttagcccttcataagcaaggccaccggtcattgaaccatcaccaattaaggccatgatgttttcatgtttgcccattaaatcgcgtgctttagccatcccagttgctaaggcaattgaggtagatgtgtgaccgacggcgtaatagtcatatgggctttcatcagggttgctatatggagttacatcttcatagtggtctggatcaagccaagcgagtgcacgtccagttaacattttgtgcgggtaagtttggtgggaaacatcccagacaatcttgtcctttggtgcatcaaaaacatagtgataagcaattgtagcttcaacgattcctaagtcgggacctaggtgaccaccttcagcggcatctttttctaagattagagtcctaatttcactggctaacttttccatttctggaagagataatttttttaaatcagcaggaccagaaattttattcaatagatattcaggatgtttatttattattatgtcctttctaacaagtagttacacttattatagataagcaaaaatcaaaataaaaatatttagttgtaattgagctcgattacttttagtaatgtaaatcagattattgacgtaggaagggacaacagtataaaatactgagtaagtatgtgtttttataaaagtttggaagtgagattatggcagtgaaaaaagcagccttagcctgcagtgtttgtgggtcacgcaactactcaatcaccgcaagtaagaatcgcactcagcgacttgaacttcaaaagttttgcaaacattgcggtaagaaaacattgcataaggaaacgaggtaaataaagctaatgattaagttttttaagagtgttggtcatgaaatgaaattggttaaatggccatccgcaaagcaaaatagacgtgatacagcaactgttattactagttcaattttatttgcggcatatttaggtgcacttgactggctcttcacttggttgactcaaagattaatgtaattgctagcataattagaaattatcagcgattcatgctataatattgacagctaaaagaaaacctctgtgggaggtttttttgtttacctaaaatttaaggagaaaaatatggtcgaaacaacacaaaagaaatggtacgttttgcatacttattcaggctatgaagacaaggttaagtcagacttgttgtcacgtgcacaaagcatggggatgcaagactacattttccgtgtaatggttccagaagaagaaaaagtagaaaccgttcgcggcaagaaacaagaaattgaagaaaagattttcccaggatatgttttagttgaaatggtaatgactgatgaaagttggttcatcgttagaaacacacctaatgtaactgggttcgttggctcacacggtggtggctctaagccatcaccacttcttgatgaagaagtaacgcgtttgcttaagaatcaaggtcaacctgctaagaaaccagtagttaactttgatattggcgaatcagtaactattactgaaggtgcatttaatggcatggtaggtaagattactgatattcaaccagataagtacaaattatacgtatcagttgacatgtttggtcgtgcgactactgctgaacttgattatgatcaagttaagaagcttgacgaaaacgaataatatttagaatttttagttgtaattgtacccaaacgatgttattctaatacggtacgtttattattgtgggaggagaaaaaaggaaaattctccattttaaccgcatcacggaatcaaggaggttttgaccgtggcaaagaaagttattaacgtagttaagttacaaatcccagctggcgctgctaccccagcacctccagttggtcctgcattgggtcaagctggtattaacattgttggttttactaaggacttcaatgctagaaccgctgaccaaaagggcatgattatccctgtagttattactgtatatgaagatcgttcattcgaattcattactaagactccaccagcaccagttcttttaaagcaagctgctaagatccaaaaggcttctggtgaacctaataccaagaaggttggtaaggtaaccaaggaccaagttaaggaaattgccgagactaagatgaaagaccttaacgctgctgatattgaagctgctatgcgcatggttgaaggtaccgctagaagtatgggtatcgaagtcgaagactaatcctgttatttaggtaacaaattaggtgggagagttaagagaagctcgtttgaccacatatacaaggaggaaatcacatgccaaagcatggtaagaaatatttagatgctgccaagaaggtagactcaaataaattatactcagtagcagaagctatgaaacttgttaaggaaacttcatacgcaaactttgatgctactgttgatgtagcttacaacttaagcgtagatcctaagcaagctgaccaacaaattcgtggttctatcgttttaccaaatggtaccggtaagacccaaaccgttgtagtatttgctgaaggcccacaagctgatcaagctaaggctgcaggtgctgactttgttggctcagatgacttggtagaaaagatccaaggcggctggttagactttgacgttgtagtagctactccaatgatgatggctaaggtaggtcgtttaggtcgtattcttggacctaagggcttaatgcctaaccctaagactggtactgttaccatggatatcgaaaaggctgttaagaatgttaaggctggtcaagttgaataccgtgttgaccgccaagcagctattcacactcctattggtaaggtatcattcactgaagaccaattagttgaaaactttgacgcattacgcgacgttatcttacgtgctcgtccagcttcagctaagggtcaatacattaagagtgttgctgtttcagcaacctttggcccagggatcaagcttgatccattaaacttggactaatttaaaatagactattaaaagcctcgctattgcgaggcttttttctattcattgacctattattttcgaacatggtatcataaattgaacttacaaatctatatattaaggataatgtcatgaaaaagcattctattggaaaactagtcattatgttggtgctaatgctagcttttgttacgggctgtgctaataatggttctaaaatcactattgttggttcaagtgcaatgcagcttttagcagaacaagcaggtaatgattatcgcttaagtcatcaagacagcaacattgtcgtgcagggtggaggatcaggtacaggattgagccaggttcaagctggtgcagtccagattggaacctctgatgtttttgccgaaacacaaaagggaattgatgccaagaaacttcgtgattataaaattgcagtagttggtattgttccaattgttaataagggtgtaggtgtgaaaaatgtttcgcaaaagcaattgaaacagatcttcactggtaaattaacgaattggaagcaactaggtggcaaaaatgaagccataactgtgatcaatcgttctaagggaagtggtactagatctgctttcgaagatataattttacaaggaacaaaaccagttaagtcgcaagaacaggactctaacggtgccgttaaaaagattgttaattcaacgcctggtacgattagttacttgtcctttccttatgctcatgataccaatattcaaaagttgagtattaatggggtaaagccaactaacaaaaatattactactaataagtggaatatttggtgttatgagcacatgtacactaagggtaagcccaacaaacaaactaaagcgtttattaattatatgttaggtgaaaaagtacaaaaagatcttgtacctaagattgggtacctcagtatcaatgaaatgaaagtaactcgtaatagcaagaatcaagttacacaaataggaaaatagttcatggataagaaggataaattaaaggaagttgttgatcaagcaattgctagtcaacacgttccacacgttaaattaaaaaagatgggtccgactagtgttgatattgataaattaaccaagccatctaaagagactcatcaagaatattggggcaagggtttaacttacttggcaattgttttgattattgtcttagttgtctcaattatcggctttgtcggctatcacggcttggctacttttgtcagcgatcatgttaatgtcattcactttttgacttcaactgattgggacccgggtgagggcaagaatcatgttggtgctgcggtaatgatcgttacttcgttcttagtaactcttttagcagcattggtagccaccccgtttgcaattgcaatagctctttatatgactgaatattcatctaaaaagggtgccaatttcttacagtcagtgactgaattattagttggaattccgtctgtagtttatggtttcttgggattaactatcatcgtgcctgtgattagaaaactatttggtggaacaggttttggtattttagcagctacgttggtgttgttcgttatggttttaccaacaatcacatcattaacggttgatagcttaaaggctgtaccaagtcattttagaaaagcttcaatggccttaggttctacgcattggcagactatttatcatgttgttttgcgagttgctacgcctagaattttgacggcggtaatcttcggaatggcaagggccttcggtgaagctttagccgtacaaatggttatcggtaatgccgtcttgatgccatacaatttggtcagtccatcagcaacattaactagccaattaactagtcaaatgggaaatacggtcatgggaactttgccaaacaatgcattatggtcattagcattattgcttttaattatgtctttggtatttaatttcctagttaagttaattggaaagaagggacaaaagtaatatggatgcaaaaaagaaagataaattagctacggcgattatctatattttggtaggaattgttgtattaattttggccggtatcctaggtgatatcttgattacaggtattccacatttgtcctggcgctttttgagttctgaagcctcatcataccaagctggtggtggggtacgtgatcaacttttcaattcaatttatttgttaattttgactactattatctccttaccaattgctttaggagcagcaatttatctagcagaatatgctaaagataattgggtgaccaatttgattagaactacaattcaaattcttagttcattaccatcaattgtagttggcttattgggttatttattgtttgtagttcaatttggctttggtttttcaattatttctggtgctttagctttgaccttttttaatttgccaattttaactagcaatattgaagaagcaatcaagggcgtcccacaagatcaacgtgaagcaggattggctttaggattatctaattggaaaactattcgcgggattgttttacccgctgctcttcccggaattttaactggaattattttgagtgcgggccgaatcttcggggaagctgccgctttgatctatacagcgggacaaagtggatcaacagtcaattatgcggactggaatccatttagtccaactagtccacttaatgtaatgcggccagccgaaacattggcggtccacatttggaaagtaaatactgaaggaattattcctgatgccacgattgtttcagcagctacttcagcgctcttggttattgtggtaatcgtatttaatttaggtgcacgttatttaggcaataaattgtaccgcaagttaactgcagctaagtaggtgaaataatgcaagatttaaaacctagctatattaaaacttttgcaaatgatgatttggaattatcaactgaagatttaagtgttctttatggcggtaaggtacaaaaattatttgatgccagtcttcaatttaaaaagaacacgattacagctttgatcggtgcttcgggttcaggtaaatcaacatttttacgttcattaaatcgaatgaatgatcgagtagcaactgttaacggaaaaatctggtttcatggtttagatgtgaataagcctaatatcaatgtttatgaattaagaaaaaacattggcatggtttttcagcggcctaatccatttcctaaatcaattagagaaaatattgtttatgctttgaaggcagatggacataaggatcgggcagaacttgatcgagttgtagaagaaagtttgcgtgcggctgctttatgggatgaagttaaagataagctggataaaagtgcattagcattgtcgggtggtcaacaacagcgtttatgcattgctcgtgctttagctgttaagccagaaattttactactggacgaacctgccagcgctttggatcctgtttctacttctaaactggaagatacccttaagcagttgaggagtaagtatactatgattatggtaactcacaacatgcagcaagcctcaagaattagtgattatactgcattcttccatttaggacatgcaattgaatataattcaacggcagagatctttactaatcctaagggtaagattactgaaaactatattcagggaagttttggataaaatgacaacaataatttcagcaaaagatgtacatctaagttatggcaattatgaagcactgcacgggatcagtcttgattttaagaaaaaagaattaacagctttgatcggtccaagtggttgtggtaaatctacttttttacgctgtcttaatcgaatgaacgatgacatcgaaaacattaatatcacaggtgaaatcaagtttgaaggccaagatatctataattctaaaatggatttggtcagtctacgtaaagaagtcggcatggtttttcaacagccaaccccattcccgttttccgtatatgacaatgtggcttatggcttaaaaattgctggtgttaaagacaaagagctaattgatcagcgggtagaagagagtcttaagcaagctgctatttggaaagaaacaaaggacaatttaactagaaacgctcaagcattttcaggaggacagcagcaaagaatttgtattgctcgtgcgttggctgttagacctaaagttgttttattagatgagcccacaagtgcgcttgacccaatttcaagtagtgagattgaagagacactgatggaactaaagcatcagtatacttttattatggtgactcacaatttgcagcaagcaggacgaatttctgatcagaccgcctttttgatgaatggcgatttgattgaagctggtccaactgaagaaatgtttattgcacctaagaaacaaatcacaagtgattatcttaacggtcgttttggttaaaattttgaggtaaaaagatgcacgaaatatttttggatgaactgaaaaaattaaatacacaatttatggaaatgggtgtcctcgtcaacgatgatattgaccatgctacccgtgcttttgttgatcatgataaaaagactgcgcagtcaatggttgatgatgaagaaaagattcctacagaatcaattaatattcaaaagcaagccttaaaattaatggccttgcagcaaccggtagctactgattttagagttgttatcagtattttaaaggccactactgacttggagcgaattggtgaaaatgctatgagtattgctctggaaacaatcagagtaaaaggtaatcctcgtattccagaagttgaagaaattatttctaatatgacacataatgtgcgacatatgttaattcaagttttaactgcttacgtgcaagatgatgaaaaaatggcacgtgaagtggctagtcgtgatagcatgattgaccacgactatgtaagagctcgtcaattgatcgttgatggaattgaagatgatccttcgcgtgcaatggcttcatcaagctattttgtagttacccgtttacttgaacgaatcggtgaccacattgttaacttggctagctgggtggtttataaaactacgggtgaactagaagaactatctaattcaactgaaagtgaaacgatttaaataaagtaccgtaaaaagcggtgctttttttgtaataaaaaacagttgatacgcgtggtgctagttaaatcgttctagacaatatgccatattataagctaaaatagctatttctagccgctgttgaaagcctactggacttcttgctcgattattctcagcgttgtaataactaagcaaagaaaagtcgctttcaatgctttttctaattgccatcatcgcttactattgcgtggaccttgaagccataataatagactttcttggttgctttataaccaatatcagctacgccccgaaagatcttgacacgataattgcaaacaggctggcaaactggcactgggaaactatcaataatcaaaaattctccagctgtctttacttcttgattccaagcctgacggatacaacgaattagaggcaagagcattcgagctcgacggttaaaacgagaatgagataagccaacgaagaatttacagaatcttcgttgagattcaattccaatttcagtttgccaaatgagcatcgctaagatagaactatcaggaagcttggtctgatcaacatttttacgatgtttaagtccatcaggcgcataaagcttatatagcgagcgacaaatcacatttaaccgattaaaactaacttgtaaatggtgagaaaaacgcttaagcttgagatagttcaattagatcagactcttttctatttaaattacctacaacttttattaactaaaacgatttaactagcaccacgcgtataattaatgaatatttcaaaaactgtattggcgttataccaaacaattattggtgaaaaacagaaacgcttaatcaagacagtagatgcttatttggacattaactacggtgataaagtttatcagataattgatcaagttaagaaacgtaatattccaattttgtcttttggggatatagcagatcaaaacaatacttactcaaactacactgtttttggcaatgatcaagttgacgagatggtggataaaattaatgaaatcatcaataaccaaaataaataaaattatcttttgcattttacagcaaagcttgctataataattaactgtaaattctacctaagactcgggtggcatgacgcctcaaaatcccgccgaggccagaagatgatgaagatttttatgctccatgtctttcggcatggagtttttgcttttttaaggccttatagaatttatcaatgtgatcatggaggtgaaataatttgagtaaagctgctattgctgaaaaagaaaagttcgttgatgcatttgctgaagaacttaaagctgctaaggcaatcttggtaattaactaccttggtttgactgttgaagaagttactaacatgcgtaaggaacttcgtgataacgatgttaagatgaaggttatcaagaacacctacttaagacgtgctgctgctaaggctggtatcgaaggtcttgatgatacttttgttggaccaactgctgttatctacactgataacgctgatgacgttactgaacctgcacgtatcgtttctaagtacgaagatgactttgacgttatcgaaattaagggtggtatgcttgaaggtaagttgacttctaaggatgaaatcaaggaacttgctgctatcccaggccgcgaaggtttgctttcaatgcttgtttctgtattacaagctcctgtacgcgactttgcatatgctgttaaggctgttgctgaatctaaggatgaagactcagctgaataataaagaaatttatatttaatatctaaattctaatttttcggaggatacttaaatggctttagatactgataagattattgaagaattgaagggtgctaccatccttgaattgaacgaccttgtaaaggctattgaagacgaatttgacgttactgctgctgctccagttgctgctgcaggtgctgcagacgcaggtgctgctaagtcagaattcgacgttgaattgactgaagcaggtcaagaaaaggttaaggttattaaggcagttcgtgacattactggtcttggccttaaggactcaaaggaccttgttgatggtgctcctaagaacgttaaggaaggcgtttcagaagacgaagctaacgacatcaaggctaagcttgaagaagttggtgctactgtaacccttaaatagttacagcccaactgggcaactatgaataagctctttgctatgtgcgaagagcttatttttttgtataattaaatttatgatgaaagatatagaaagaagactaacgccatatcaatgggtaatggccattttagctattatttcgatttttttgattattttagattttgctgcggttattaatattgatgaaccgactagtaaatggttctggatcaatagtgcaattgtagtatattttgcaattgattattttcgtggcttacatgcagcagaagacaagaaactatatttcaaaactcacatttatgacttgctgagtattattccaatggggttattgtttatcagcttaaatatttttaatttatctgggctggtatcagatttgcggcatttgcgtttgattcgattagctggtttgatgggaaaattacgtaatatttttcatactaatggcctactctatgtaatcttttttacaattacatttttgttggtaggagcggaagcattcgcaatcactgaacatgtaacgctggatactgctttttggtgggtcatttcaacagcttctactgtcggttatgatgcaatttttggcaaaacaattccaccgcatagtattgtaggaaaattcgttacattagtaatgatgcttttaggaattggaatagttggtatgttaacgtcatcgattacttcgtatttgatgaggagaacgaatggcgcgaatacgttaaaaacgcatgataatattcaattaattttgaaaaagcttgataatttagaaaagcaaaacaaggatttggctgatcaaaacaaaaagatgcaagcacagattaatgaattgaaagatgtacagaatacaacggagctgcataagataaaagaatggtttgagaaaaagaaaggttagttaaaatgagtgaagaaaaaaatcaaatgtattttgcgactgatcctactgccaagcatgatcaacatgttgttgattatcatgtggataatattgatttgaaattcacaacagacgcaggtgtcttttctaaaatgagggttgattatggctcaggcgtattgatcaaggcaatgaaagatgttgtttttcctaaggataatatcttggatgttggtaccggttatggtccgattggtttatttgcggctaagttttggcctgatcaaactgtagatatggttgatgtaaatgagcgtggattaagcttggcaaagcagaatgcacaagttaatcacatagataatgtaaatatctattcctctgattgttatgaacatgtggataatgataaaaagtttggtctaatattaacaaatccgcctattagagcaggaaaaaaagtggttaatgagattttactgggagcaaatgagcatttggttaatggcggtatcttattagtagttattcagaaaaagcagggagaacctagtgcgcgtaagctgatgaccaatacatatggtaattgtgaaattttaacaagagataaaggctattatatcttaaaatcaactaagaaataactaaataaaaaatgcttgaaagtactattaaataagcattagactttataaaagtgctttcaaaactggatttatcctcgtataataatcttgtaaatatcaagagtatgtgaagaggataattattatgaaaaaggcttggaaatacattgttgcagtattgattgtaattgttggtgtgtttatgttaggtatgatttccggtgataacgagactgctgctccagctggaattgctgcattatacttgatcttgtcaggaatctttttctaccacaactttagaaatcgtaacattgaaccattgtaaaaagtaagcagctagtcgcaaatagctgcttttttgatacaataaataaaaacgatgaattgagaagtgataaaatgctgtctggcgaagataaaaggaaatacatgcaattagccattgaccaggcaaaagaagctgaaaagcaaggagaggtgccgataggggcagttgttgttgatcctgatggccgcgtagttggtactggatataacaggcgtgaacttgatgaagatgctacccaacatgcagaaatgattgcgattaaagaagcttgcagtaagttaggcatgtggcgcttaattgactgcagcttattcgtgactttggaaccatgcccgatgtgtgcaggggcaattattaattctagaataaaagacgtttatttcggtgcacttgatccaaaagccggagcttgtggatcagttgtggatttatttagcgtagaaaaatttaatcatcatccgcatgcaattcgtggactgtatcgtgatcaatgtgcacaaatgctaaaagattttttcagagcgattcgtgagaaacaaaaagcagctaaattagctcaaaaagaagtataaaatcagtaatttttaaaacaagatgctggtaatatttactgaaatacgttaacatagttgttgggcaatgtttgacctctgaattgtgtcaggaccggaaggtagcagcactaaggttgttcaggcatgtgccttttttgttagaatattaacagctcttagctcttcgagagctaggagcttttttacttaggaaagagaatttatggcttatcaagcgctatatcgtaagtggcggccgcggacttttgacagtgtgattggtcaagaagcgattaccgataccttaaaaaatgcgattaaacgtggtaaggtttcccatgcgtttcttttcgcaggaccccgcggaactggtaaaacatcttgtgctaagatttttgctaaggcattgaattgtactaatttgcaagatggcgaaccatgcaatgagtgtgctaactgtattgcagctgatcaaggttcaatgccagatatcatggaaattgatgccgcttcaaataatggggttgatgaaattcgtgaaattcgcgataaggtaaaatatgctccaacggaaggtaaatacaaggtatatatcatcgacgaagttcatatgttgtcgatgggagcttttaatgctttgctgaagacattagaagagccaccagagcatgtagtatttattttagcaacgactgaattgcaaaaagtgcctgcgacaattatttctagaacgcagcgctataattttaagcgaatttccaaagaagaccttgagaagagaatgaaatacattcttgatcaagaaaatattaaatatgaagataaagctttagcagtcattgctcaagtagccgatggtgggatgcgggatgctcttagcattttggatcaactgttgagttacgagaaggaaagcgtcaactatgatgatgctttgcagattacaggctttgcagatcgagaaaatattgaaaaaattcttttagctttgttaaatcaggatgcaggtcaagccttgcagtttacacaagatgagttggctaaaggagctagttcaaaaaacattttagatgaaatcatcgatctaactactaagagtttattaatcgtcaaaaccgatgaaaataaacaggaaacttttttaacaaaagactttattgaaaaaataaagagcgtttctacagatagttattatcgattgattaatttggctaataatgccttgaatgatttacgctatactaatcagcaacagataccactggaagtgttcttagtagaagcaagtagtactgcaccagtgcagacaagcgctgccccagctaagacaacaccagctcaacctgcacaaggtaatactgatttgcaggctgaactagcagcgctgaagaagcaagtcgttgatttaacacaaaaacttagtgaagtatccaataagccaagtttatcaacaaatcaggtatttcacttggatactgcggtacctaaagtggctcctaagcctgctgttaaaccaaaagagaagcaaactaaaaagccggttagaaaagtcaaaaaaactacggcagaaaatcgcaaacaagtatatcatgttcttgaaaatgctactcgaaacgatttagagacaattaagaatgtctggcctgatttacaatctgttttagctgtctctgaaaaagcactgcttgatgtattagaaccagtggctgctagtcctaaacaagttgtcatgaaatgcaaatatactttatggtttgaaaatgcgagcgcagataatgatctgttagggcgcttaacagactatattgaaaagtttgctaaacattcttacggcattgttttggtgccagataacgattggctggcagttagaaaagaatttgttgaaagccataaggatgagctacttgctaagaaaaagcaacagattgagattcaagaaaaaaagtcagatgaaccagaagttgatccagaagtgattaataaggcaaaggatctttttggggatgcagtcaatattaaagactaaagtactatgagcaatgattataatattaaagttttaaataaagaaacaacattacagatcttactagaagatcataattctttgattcgttttggagatggagaattagatttaattagaggagcaagtattccgtatcaagattatcaaccggaattagctggttcgctaaaagagctcctgttagaaggcagcaatcgccgtttattagtaggattatctgatgtttttgaaaagttagatcgctataatgattattgccgtaatttttatcaaaatagtttcttcccgaataatcatgacttgttaagagaagttgaattgcaatacaatgtatacgtttctactttcttttcacggccatatattgatttagtagatgaaagtcacgctaaagattattttgctaaaatgaaacagctttggcaggatcatgatcttttaattgtagaaggtaaatatagtcgctcaggcgaaggcatgacttgttttctaatgctagatcaattagtagactcatttgtccgccaactaatgcatatagtcgcaaaaaagttattgaagatgaaattattaaaaatgcagctaataggttgattttactgatgttaggtcctactgcaaaagtgattgtggctgatttgatagctcagcttaataatcaaatgattgatatagggcacatcgattcagaatatgaatggatgaaaatgggcgtaactaataaggtgaagataccgcataagcatactgctgagtttaattttgatgataaacaagttaaactagagaaagacgacaattttgataagcagattattagtataatagaataataaaggagaaaaattatgagtagaagacctaattttggtggtatgggcatgggcggcatgaacatgcaacaaatgatgaagcaagctaagaagttgcaagcacaaatggcagaagagcaggaaaacattactgctcaagaatttactggtaagtctgccgatgatttagtagtagctacctttactggtgaccgcaagttgaaggacatcaagattgataaggaagcaattgatccagacgacccagatatgttacaagatttggtaattgatgcggttaacaagggcttgaccaaaattgatgaggcaactcaggcaagcttaggtaaatacacgaaaggtttgatgtaattgcaatatccattaccaattgctcatttaattgatgcttatatgaagctacctggaatcggtgaaaaaacggcgactcggttggctttttatacgatggatatgcctgatcaggatgtcgatgattttgctaagtctttagttcaagtaaaaaaagacattcatcaatgtccgatctgtggcaatattaccgaaaaagatgtctgtgatatttgctctaatcctaatcgcgatcaaacaactattatggtagttgaacaaccaaaggatttgatggcttttgaggaaatgggcgaatatgacggactttatcacgtgcttcatggtgttctttcaccaatggatggaattggaccagaagagatcaatatcaagtctttaattacgcgtttgcaaaaaaatgatgctgttaaagaagtgattttggcgcttaattcaactccagaaggcgaatcaactgcgatgtatatcagcaaattaattaagccagctggtattaaggtaaccagattggccgctggtttgtcagttggtagtgacattgaatatgctaattccattactttaaagcgcgcagtgcaaggaagaacggcattataatggctaataaaaagcaagcaaagatcaaagcaatgggtgatcaaaagttggtagccgagattgaaaagctacaaaatcaaattgcattagagcaagatctcgatcaaacaactttagatttatccgaagataattatgtgcaaaatcgaatcttaaaggcaaagtatacttttttgtataatgaagctcgtcatcgaggcacaagatttagtggtattactaatgctattacccagtagaaaaagaccgaatattggtctttttttattttgaataaataaaaaatagtaggactgttaatctctatgaaacttctgtagaatagacatatggaggattttatgagaggttattttgttagttttgaaggccctgatggcgccgggaaaagtacagttttaaaagaagtattgaaccaaattggttcagagcttaagacacaatatcttgtgacgcgtgaaccaggcggttcaaaaattgcagaaaaaattcgcgacattattttagatcctgctaacgacaagatggacaataagaccgaagcgcttttatatgctgcatcacgtagtcagcatgtggaggagattattcgtccagctttaaaggaaggcaaagtcgtattttcagatcgctatgtcgatagttctttagcttatcaaggagcgggacgtgatttaggaattcaggaagttaagcaaattaatgattttgcaacggataaattagatcctgatcttacttttttcttagatcttgatcctgaagtagggttaaaacgaattgaaaagctgcgtccgggtcaggaagatcgtttggaacaagagaatcttgcctttcataaaaaggtttatgccggttttctcaaggtaaaagagacgtatcctgaacgcttcgtaactgttgatgctacgcagccaattgatcaggtagttgctcaagttattgcaacattaaagcaaagaatgccagagttattttaaggattgatttagatgaagttagtaattgcaattgtgcaaaaagaagactctaatgatttacaacgggcctttgttcaaaatgattttcgtgctactaagttagcaacttcaggtggttttttaagtcaaggaaatactacctttttagtaggttgtgatgacgataaagtagacgatgtattaaagattattaaggaacagtcccgagcaagagaggaaattgcaacaccacatatggtttcaactgggtatgaaattacacagcctttgaaagtgacagtcggtggtgcaacttgttttgttgttccagttgatgagtttaaacgcttctgatgattgatcttagtaatgttgggaaaaagcaaacccaatttttaaaaagagcatatgaccaaaaaaagttagctcatagttatctttttgttgatagcgatgaggcacgggcattgaatactgcatactggctagcttgtttgtttaattgtactggtgaaaataagccggatggcagctgtcaaaattgtcggcaaattttgtcaggtaaccacccagatgtattgctagtagcgcctgatggaaaacaggctctagggattgatcaaattcgtcccttaaaagaagaattagccaaaagcccagttgaaagtactcgccgtttcttctttattaatgaagcacaaaagttaactttagctgcagcaaacggtttattaaacttactagaagaaccagtagcgccagtagttacgattttgattactaacaatagtgatcagattttaccaacggtgcgttcacggacccagatcattaattttgacaatggtgagagggctagtggtaggactgcagtcttactggagaatggtttttcaaaagcagagattgaggaactgggtaatcttgataaatggaatcaggcaattaaatatttttatcaagaaatgctggaacacaacagcttagcacttgtcagtgcacataagctagctgctgatgctaagctagtgtcagagcagggttacatcttgcttcagttaaaattattggccgagcaagatttgcgtaatcctgctaaaagaataatggcggcgacaatgcttaagaatttaattgaaatagacaaaatgcgtttgagtaacgtaaatttacaaaatgcgttagattatctcgccttaaaatggaagtaggtgtttagattggatccatattcaaaactgaaaaagattgaagaaacaacagaaaatatgaccaagacgattgccagcttggaaaatgatattttagaaacattaaaagaaaacacggagttgaaggtagaaaatcaattactccatgagaagctggacaagttaacggcaaatcagcctgcacctgagactaaaacgcagagtggcttggaatcattgaagaagatttatgattcagggtaccacatttgcaatatgtactatggctcgcatcgtgatccaagtgcagattgtatgttttgtcttgatattttggacaattttggcgaaaaaaagggcaagaaaaaggacggtagataatgaaacgtcaaagcagttatgcaaaagatgaaggaaagctttatttagtgccaactccgattggtaacttggaagatattactattcgcgctaaaaaagttttaaccgatgcagattatgtagccgcagaagatacaagaactagtgggattttactggaaaaaattggggttcataataaaatgatctcttttcataagtataattccaaggagcgggcgccggaattgatcaagttgatgaaggaaggtgctgtgattgccgagattagtgacgcggggatgcccgtgatttctgacccaggttatgtattagtacaagaatgcattaagcatgatattccggttgtaccacttcctggtccaaatgctttttcaactgctttgattgcttccggttttaatcagccatttacttattatggctttttaccaagaaaatcatcggaacagaagacctattttgcacagatgcgcgataatagagcaacatcaattttttatgaagccccgcatcgtctagcaaaaaacctcaaaacattggctagtgtgctgccaaaagatcgtcaaattgtagctgcacgtgaactgaccaaaatccacgaagagtttatccggggtagtgtggaagaagttacgaattacttcaatgagaatgctccacgcggggaatttgtgattctagtttcacctaatacagaagcgcctcagcaactatcttggacagaattaattgacttagttaatgacttggttgaaaaaggtgaatccaagaaagatgcaattaaacaggtagccaagcagcatcatgtttctaagaatgaattgtatgatcaatatcaccaggattaattatgaagtataccgaagaatatcaaattgaatttaaagattgtgacgaaaatcggcgtttaaaattaccagcactagttgagttaatgatgcaggtttctgagcatcaattaagtcaaggtggtgctgggactgatgacttggttaagcgtggtctaggctgggtcgttactcaatatcattttgagattaaagacctgcctaaaccgggtgatcaagttattctaagtactgaagctagcggctataatcgtttttttgagtatcgtgattttggcgttagtacgcaagacggtaagccattagtgactgtaaaaagccagtgggtaatgctcgacttgaagaagcggcatatggtgccaaccgatactaaaatgatggaagattggggtgcaccactacttaaaaagatgccacgttttccaagattgcgtccgcaaaccgaatacgagcaaaagcgttcataccgtgcgcgttacgatgacttagatactaatcatcatgtaactaatagtcattatttcagttggtttgttgatatgttggatcgtaactttttaaaagaacatattgttacagcaattgatattaaatttgataaagaagttcattatggtgagagtataaattcttgcatggacttggttcaatatgatattattattacatctcatgcaattgaagcagaagatgggacagttaaggccgtctgtgaattaagttggcgtgagatatagtaacaacatgacgctattagttgtttttatttaggggaggaatcggtcaaatgaatacaaagaaaattttacgaacggatttacagcaactagtctttttaggtattgttgttgcaatgaaaattattctaagtcagttttcttttggtccagtaatggttaaagtgggactgggtttcattgggagtgtgctattaggatatctctttggtccgctctggggaacaattggcggtggaattagtgatttaatttcatctgcactttttggcgatcaaggtggctttttcattggttttactttaacagcaatggcaggcccatttatctacgccctgtttttatataataagccagttaaaatttggcggattattgcttctactattctggtgactgtaattgtcaatattggcatgaataccttatggctacatattatgtatggtatcaatttcaatgcggctttgatccaacgtttacctaaggagatgatcgttccttggattcaaatggttatcagctactttgttttacaagccgtttctcgtgttaaaataaaaaagtgatttaaagcgaaaagagaaaaatgtataaaatgaaaattttaagtgtttcgacagctactaatcatttgagcgtggccttgaatgatggtcaacaaattattgttgagaaaaatgaacgagatgagcgtaatcatagcgaacatcttgatccttggattgatgaaatcttaaaagataatgatttaagcttaaaagatattgatcgttttgcagttgctattgggccaggttcttatactggactaagaattggaatcactactgttaagatgtttgccagcattttagataaagaggttgtaggaatctcaactttacaagctttggctaaaggcgttcaagaagacgctttggtaattactggtttagatgcaagaaatgacaattattttgcggccggttatttaagcggtgctgtaccagagaatgtcattccagacggtcattacaatatcgacgttttaattaaggcgattcaagattatgcggccaagcatgaagttaagaaaattgtttttgtgggctcaggtcttgaaaagcaagatgaaaaatttaaagctttgaatattccatatgtttatggaactgaagaagagaatgtcatccatgctgggctaattggacaattagctgaaaatgcggttccagttgatccagataaattattgccacgttacttgcgtcgaactcaggctgaagtagactggcataaaaagacaggcaaaccattcgagccagatagtcattatgttgaagaagtttaatcaatttttccatcaacagttaaatcggattgatatgagttttaccccgtttattgcgaatgtaaacggtaagagactacaaattatgcaagctacagatgacaatattcctgacctgcttgtattagaggagcaagtttattcaggtcggacaccgtggaataagttttcatttgagcgagaactagagaagcggcataattgtctttatttggtagtgtattatgaatcgatgctagttgcatttattggtgcgcgttttactccagaagagacgcatattactaatattgcagtagcgccggcttttcaaaatatgcatattggtcgttacttaatgcaattgattattgatcgggcgcgtgaaaatgacagtgattgcgttagtctagaggtaagagtagataatgagattgcccaaaagctatatcgttccttaggttttgaaggtaccttcattcgtaaaaactattaccatgatactcataccgatgctatgaacatggttttatggttaaaaccacatcagattaaaagaaagaagtttacgttttgagtgaaaaaaatgttcgcattttagcttatgagagttcttgtgatgaaacttccactgctgtcattaaaaatgggcgtgagattgaaagcttaatcgtagcaacgcagattaagagtcatcaacgctttggtggtgtagtccctgaagttgctagtcgtcatcatattgaagtggttagtcagattactaaagaagctttggctgaagctaattgtacttggaaagatatcgatgcaattgctgtgacttatggccctggcttagttggtgctcttttaattggtgtaagtgcagctaaggctgcttcaatggcaacgggtattcctttgattggtgttgatcatattatggggcacattatggcagctcaactaaaagatgagattgaatatccagctcttgcattacaggtttcaggtggacatactgaaatagttttacttaaggatcctgttcattttgaaattatcggtgatacgcgcgatgatgctactggcgaagcatacgataagattggtcgtgttcttggggtaaactatccagcaggtaaaactatcgatgcctgggctcatgaaggcaaggatacctttaacttcccacgagcaatgatggaagatgatgactatgacttctcattctcaggtttaaagtcagcttttattaacacttgtcatcatgctgatcagattcatgaaaagttgaataagtatgatctggctgcaagttttcaagcagcagtaattgatgttttggctcataaaacaattcgcgcaattaagcaatataagcccaagacctttatcatgggtggtggggtagctgccaaccatggcttacgtgatcgcatgagtgcagaaattgctaagttgcctaaagcagaccaacctaaggtgattttgccagatattaagttgtgtggtgataatgctgcaatgattggggctgctgcgtataatctttataataatggtcaatttgcggatttgactttgaatgctgatccatcacttgaattgccatatgctaagagcatgttgaattaaatagaataactttttaaatcaaatacctagaacgattatttctaggtatttttttctactaaggcatggtccttaggatcttttaaatctaaggcgattgattcgtaagcgtcaaataaaatagtgtacttaaaaaccgtcccagttactgttatactgagacggttatttaagttcttttatttacaatttatctggatcttctcttgccacggtaaataagcttcaagggtttccgaatccagaatctcttcattcggtaatttctgaagcaaataattcaagtacttttcaggatcaaggccatttctcttggcagtttcaattaagcttagaataaagccacttgcagtagcaccctcaaaactttgagaaaataaccaattcttccggcccatgacgagtgattttacagcgcgttcagccttattgttagataattctaaattgccatcaagcaagacatgctcaaaagtagcttgatgcttgagggtataattaatggctcttcccaatttagagcctggcaaaacggtgattttatttttctcacaccagttgaagaactcttgcatcagaggcttgagctttgcttgtcttagctggtaacgttcttgtttgctcaaattctcccaggtttgttctaagtaaaacatgcgattgcagtagttgagtcctttttgggcaagggacttttcagaagcctgttgtggtacggcttcgtgaaactttcttctaacatgagcccagcagccaactaaagttgctttcggcaattgctcataagcctgccacatatcacagtgcaaataaccgggatagtttcctaaaaagtttaaggcaaccttgcaactccgggaaggatcatgatgatagagtgtaatcccgtattgatcatgtttgcctgaaaggaagacccaatagtaagtcttgattgttttactttctaagactgtataataagtttcatcggcatgtaaaattggccgcattaacagcttttgcttaagcagatcatacactggtttaaagtagtattgactgcttttcaaatcccaataatttaacatctgtcttgaaacttctagtcccatcttcttccagtcgctttcttgacgatagtccggcaccttcatttcatatttttgataaagtgaatgagcgatgagtgaagctgaacctagaccatggtttaggggagctttaggtactgcagctttaatgatcttgtcgctaagatttctttgactgcaatatttacatttgtaagcatgttggatatggtctaaccttttaagttgagctgggataaacaataattcttggcgaactgactgcttgcctatctcaatcagttcatgatgacaatcaggacaatgcttgtcgcctaattcatggtgaacctcttcagctggaagggcagctagtaagtcagcacgctttcgtttgtgagcttgtcttttataagtaatagtctgaacggcggcgtcggggacgttctccgtcatcttgagcatcaggttcatcaaagagacttgtttgtccatttaaaggcatttgttctgaagatttgccataacgtttttgcgttaagtaagctacttgttcacggaggagcttaatttcatcagttaagttttgaatagtagttgcttgttgtgcaataatcttttccaaattttcttgtgacatgagttaaacttcctcctaaatttattagttaaaagaatatcaaaaaagcgtgcgatgtcaagtgttagtagaattcgcacgctttcgtgttctttatttttggattgattgcgaagcccttcattagccagtcgacctgctcagaagataaagcttgaacttcattttgattcctgggccagttcaattttccattttcaaatcttttgtagagcagccaaaaaccttgtccgtcccaataaagggctttgaagcggtccttgcttccgccgcaaaagaggaagactttgccgctaaaaggatcaagttcaaactgttctttgactaaagttgctagtccatcaatgcctttacgcagatccgtcttgccgcaaacgatatagacttgccctaagtcactgagcttaatcatggcaagactttctcaagcagcttattcataatttcagggtctaagctgctgtaaaaattcagctctaagtcattcttctttaaactaagcaacagattattgcgtggtggacgagccttcttaggtttagaagaacggccaagtgccacaatgggttgttgtttttcgatcatattcttaacctccattaaattgatgagattagaatacctgaaaaatacggactaaaaaagatactcggttatatgacgcttacattgattccttgcctgcgttacaaattctaaagtattcgctagaaccatctgcgatatatggccccatgtgacgcgtgtcatcgcctgtttttctttcgatatgaattacccgggcaccactatctgcgagcattctggtacaagtagggcctgagaggacgtgggtaaagtcaataacgagcatcccgcttaaaggataaggtttgtttttatctaaatgactgttttttgcttctagctcagcataattaggttctgtcatagttgtgcgctttctattttaaaaagaaaaagctgttcgaagtgaacagctttttgatgagaataaattaattattcacccttgataacttcagtacgtggattcttaggaccttgagccttagaaattacgccttcttcagtcaatttttcgatttgatctggatcataaccaagtgaagctaaaatttccttgttgttttcaccaagatctggagcacgcttgtagttagaaagtgagaatggcaaaccaatagtcttgaacttaccacggttaccaccttggtcgatggttacgatagtaccatccttgttcaagtccgggccattttcaatttcgtgccagtcaagaactggacctacaggaataccagcagcaccaagcttcttagttaattcatacttgtcgtattgcttagtgtagctttcaattaatgggtaaatttcttccttgtgtaattgacggttgtgccagccatcaaagcgaggattagtttcccaacctttagccttgtaagtccgaccgataacttggccaccttcagtgttctcagcacgaggaattgccttgccccatttccagttagggtaaacagcgtagtgaggaagggcacctaagttgtctaacatgatttggttacgcaacttgatacggcagaggttcaatacagcgtcttgcattgactggtaaacaaaaataccttcactggtgtgttcacgttgaagaagggcagctaagataccaatagtaaggtgcatccctgggtttgagtcacctaaagtagcagctgattgagtaggaacgttggctttgccttcgttccaaccagtagcagaagcagcaccaccagcagattgagcaactggttcaaaggccttaacgttttcaaaacgtgaatcttcattgaagcccttcaatgatgcatagatcaatcttgggttcaaagcgtgaagcttttcccaaccaaaaccgttacgatcagctgaacctggtgcaatgttttcaacaaagacatcagccttcttagccaagtcgtacataatctttttaccttcatcagtcttgatgttcaaagtcaaagacttcttgttggcgttcaattgcaagtagtaaagactccatgaatcttgaatatcaagtaattcatttctagtagggtccccagtgttagtacgttcaatcttaataacttcagcaccaagccatgctaaaagttgagtacatgatggaccttattgaacttgtgtccagtcaacaactttaataccttttaaaggtgcatattcattttcttcagtcgtgattaattgtccttatcttcaagttgtgctaaatctaattctgggtttaagttaccaatgtgaccagattccttacccattgattcaggaatttgagcatcaataattgaaggattacctgattcgtaggccttttcaagagcatccttcatttcagcgtagttacttacacggtagctgtcaccaccaaaggccttagcgatttcagcatagtgagcattgtggcttaaaacagtaggtcctaattggtctttaactgggttacggtcaccattgtagataccaccattgttaatgatgacaacggtaacaggtaagtggtaacggcagataatttccatttccattccgtccaaaccaaaggctgagtcaccatgaagtgagatgactttcttaccagtttcaacagctgcagcaatggcataacctaggccgacacccattacgccccaagtaccagtatcaagacggtgacgaggcttttgcataccgattaagttacgaccaatgtccaaagtgttggcaccctcacttacgatgtaagtgtcagggtgcttttgcatcaagttattgataggttcaattgcactgtagaagcctaaagttggcttagcttcagaatcagcgattcttttagcaaatttttcattgttagcttcacaggcattcttaattgaatctagccagtcttgaggggccttaacgttagctttttcaaggggtgcgtttaatttttgtaaaacagaagtaatgtcaccttgtaatggggcatcgatctttctgtttgaatcaaattctgttgcgtcaatatcgacttgaacaaacttagcgtcttcattaaacaatggagcctcaccatttgaaagcatccaattaagccgagcaccgattaataagactacatcggcttgacctaaagtaaatgaacgagctgaagcagctgatgatggtgagtcatctggtacaacgcctttagccattgacatcggcaaaaatggaataccagtcttagtaactaattctctgacttctgcttcacttctagcataagctgagcccttacctaggataatagcagggtgtttagcgttctttaataattcaacagcacggtcaattgcatcatctgatggcaattgctttggagctggatcgactacttcatagatatgagcgtctgacttttgtgcaactgtgtcggcaactgttgcagcaggaaggtcaaggtaaacaccaccaggccgaccgctcatagcagttctaacggcacgagcaactgctaagcccatgtcttcagcacggtcaacacgataagctgctttacataaaggtttagcaacattgtattgatcaagtccttcatagtctccacggtcgaggtcgatgatatgacgatctgatgaacctgagatcataatcattgggaagcaattcttagtggcttctgctaaagcagttaaaccatttaagaaaccaggagcagaaactgttaaggctacaccaggcttgccggtaagaaaaccagcagcagcggctgcgtctacagctgcatcttctcttctaaattcataaaacttcataccctttaattcagctaaacgggcaaagtcagtaactggaatgccgacaccaccatgcatgttgtttaaaccgtttgcttgtaaagcatcgattaaaagtgcagcaccagtaagtgatacatcttgtgtcacgaaaaaaaattctttcaaaaaatccccaaatgcttatgtttatgcatttcaaaaccaagatacacctcttgaattgtatatacaggcacaattgaataataaggtacgttattttaatatgcgcatataaaaataagcaagtcctaatatattagaacttacttattatacttttattcaaaattgtccatttcttcgattgccttttcccaggcagaatttgcttcatctaatttctgttgtacatcagaaagctgttcttgcagtggccccaatttatcaaagcttgaagcaatttctggattggccatttcggtttggatttcttgctctcgttcttcaagctgttcaatttgtttttctgcattatcaattgcacgctgcaactttctcttttgagaatcacgttgcttttgctcttggtaagaaagtttttgctggctaatttgtttgcttggctcgacttctgtctcagcggcactattttcagccatagctgcttgttttgccttctcatcaagataataagaataattgccatcgtagactttagcatgcccatcgcgaactaaaacaatcttattagctagttgattgataaagtaacggtcgtgggaaacaaagagcagggtaccatcaaagtcttttaaagctttttctagtacttcttttgcttcgatatctaagtggttagttggttcatccatcagtaagaagttatcatgttcaagtgataaaacagttaaagttaaccgtgctttttgtccaccagatagttgacctacggtcttatcaatgtctttagctgtgaataaaaagctggctaagattgaccgtacatcgcgttcaggcatggtcttatgacgatccccaacagtatccaatacagttttagatggatctagtctttgtaattcttggtcgtaataaccaatctcaagggatgcgccatacttaattgagccactcttgggcgttaattgcttcataatagtcttaagcagggtagatttaccgattccatttggtccaatgatcgcgacgcgatctcctttattaatctggaaggaaatatctttaaccatggttttatcgggataaccaatcgtcaaatcgttgaaaattaatacttccttgccagaaggatgatcgcttgaaaaatgaatccgtaccttatttttatgtttaggtggagtaatccgctcaattttttctagttttttacgccgactttgtgcacgcttagtggtagttgctcgaaccaagtttttttggataaattcttcatcttttttgatttcagcttgttgcttttcataagcggcttcttggtccttatcacgttgctcgcgctgcatgacataggctgaatagttgcccttaaaagcagttaatttaccaaattctagttcaaaaatttgggctgctaaatgatctaagaaatattggtcgtgggaaaccacgaggattgcaccactgtaattctttaaaaatccttccaaccaatctagggtatctaaatctaagtagttagttggctcgtccaataacaacagagcaggtttgcgcaaaagcaacttaacaaaagctaaccgtgttttttcaccaccggataaactaccaatcttcttttgccaagtgtcttcaggaaacttaaagccattcaagatacttttaatatcagattgataagtataaccgcctttttgttcaaagttgaattgcttttgatcgtattgcttaagcaattcttgatcttcaggatgatctgcaattttttcttgtagttggactaagctttttctttcccttattaaaggagcgaaaacggtttccatttcatcccaaatggttttattttcatctaatgcattttcctgagcgatataaccaacatcaatgcctttattaactgtaaattcgccgtgagttggttcttgctcacctgtcattatttttaacagggtagtcttaccaaccccgttaggaccaactaagccgattctggcattggaatcgattgaaaaattaacatttttgaataatgtgttggccccaaattgttgttctaaatcgtgtccttgtgcaataatcataatttttcacctaaccactattctaccatatagcgcaaattgtttgtttttaagttaaatatgtgaaaaaatgatgatttgtgaaaaagatacttgcataagtactatcatagcaggtatgatagtagtgcttgattgtacattcacaaacatttaagtttggagggttcctatatggaaaaaataaaaatcccaaaagcaacggcaaaaagattaccattatattaccgttatttgattattttaaatgaagaaggcaaagataaggtttcttcaactgagctgtcagaggcagttcaagtagatagtgcttcaattagaagagacttttcatattttggtgcgttgggaaaacgtggctatggatatgatgtaaagaatttattgagcttcttcaagaaaattttgaatcaagatactttaactaatgttgctttaataggtgtaggtaatctgggacgggcgctgcttaattacaactttaagcgcagtaataatattcgaatttcctgtgcttttgatatcaataaggagattactggtcgtatcttaagtggtgtccctgtttatgacatggacgacttaaagcaacaactaagtgatcaacagattacaattgcaattttgacagttccttcaacagctgctcagaaaaccacagatgaaatggttgatgcgggtgtaaagggaattatgaactttactccgattcgtttatcagctccagctgatgtgcgagtacaaaatgtagacttagcaaccgaattgcaaacgttgatctatttcttagatagtgacaaagaaaactaaatttgagtaaaagaaacatactaacctagtgttggatcatgaatcgacggattcacgatctggcactttttattttgtctaaaatagaaagtgaagataaagcaaatcaagtcttcagctttttagacacttgatgtcgtaaaagaaacggactgctttaccacctattcttaagtctcttcgaagtctgtgggcacttagatgccgtgtttagaaaattagaattaataggttgataaagaggtttatcttcacagcggaggttatattatggaatcacaaattattttcggtattgatgttagcagtaaatcttccacagtttgtgtggttaatgaccggatcaaacaaggcgaatcttttagaatctctaatgattcctttggctatcaaaaactttatgagcaactgaaccaatatttgataactcctttagttgttttcgaagctactggtgtttattctctaagcctgcaagctttcttagaggattatcatattaagtatttgaagcttaatccgcttaaagcgaaaaagctaatggacaataatttacgccataataaaactgataaggtagatgcttatcgcctggctttaattcaatttaatgccccgcaaaagctgcgtgatccacagcccagagagtatcatgaacttcagaatgccagtcgctattatgaagaacttactaggagtatagttactactaaaaatcaattgcaccgcaacctccaatccactttcccacaaattgaagaaatactgtctcatccatctggcagaatttattgggcgcttgttagtcttttcccacatgctggatatgttctagaaaagaatgagacacaggtaactcaaatgcttaattctatttctggaataggacaacaaagggcacggtacttaaccacaagattatacgcttttgctagagaagcttatccttatgattccaaagatagtattatcgttagagctattcaaaggaacatttctaatttattttcactccagcaagaacgcgactatgtaattaactacatggaaaagctggctaaagcagtaaacgctcgtgctttatccatctatttgagtatcccaggggttgctagaattacagcagtgagattagtagcagagctcggtgatctaagacggtttagcacttcagctcaaattgatgcgtttgttggcattgatccaggaaggtaccaatctggtgaaaaagacagttctcttggcattaccaagcatggcaatcatattgccagaaaaatactttatcgagttattactcaaatggagacggtaaaggctacgcagccttgccatataactgattattatgacaagaaaaaacgatcttcaaatagacaaggctataagaaaatcgccattgcatcagtccataaactgatacgcacaatgtttgctcttatcaaacatgatcaattatatgattacaacatagccaccgaaaataaaagactttagctgaaatcaaataatcaacttaagtataagcaacctatggaaaaactacaagtattcataggcttatttgtggtactttcgctttttcttaaatttaaactcttatttgctttaaccttattcgcatcattaaaacaagtaaatttattttcttaaatcattgataatacttgactttgggtagaaaaaagccgattttcggctttttttcatgcagttgtttcacttttgattaatttgacaggcaaaatataattcttttggcgcaatttttcgtcgggattggaaattcgggtaagcaataacttaaccaataaagttgcaatatcatgaattggctgagcaattgtggatagttccgaatggtaagtttgaatttgctttgttccgtcaaaaccaatcacttttaattccttaggcactttaatgcctaatttttttgcttcttgtaaaactaacactgcagttaaatcatctgtgcagacgacgccatcaggctgatcattgactaacatatcatgaattttcatatttttaatgttggaagaatcagaaaaagcaactgaacgaatgtgggctgaaaagtgacattcctttgcttcatcaagataagctgctagtcgttcgtcagtcggattaccttttctgtgttcattgcccagaaagtaaattttgtgacaaccagcttgaaccaagtcatgtactgccaacttgatgccttgataattatcacaactaacaattggaacattatcagatagctttcggtcgaaagagacaattggcaaacctagttgttggtattcattgatacctagattgtgcgcaccagcgatgatgccatcaacttgattagcctgaagcatgcgcagatattcgcgttctttttctttgttttgtcctgcattgcataggattactttatagttttgttggaataaagtggtttcgatatcctgtactaattccgcaaaaaaaggattagtgatctcaggaaaaatcaaaccgactaatttcattttctttccttgtaatgagcgggcaatagaattgggacgataatttaattcccgcattgcggcaaaaactttatctttagttttttgacttaaatagccatggttgttgattactcgcgaaacggtagttacagagcaaccggcttttttggcaacgtcgcttaattttgctgccatagtatcacctgatgtttaaagaattgtttgcatttgccaaagcttgccagtgtagtcaatgtcttgagcaaacgcaatttttttgttggtctgatcggcaaagtagcgtccagtcaataccttttcaccatcattaacgaatacttcaattaatgaatgatcaacaaagatatcaagcttgaggtcatgatttggtgaaagcgtaatagctcgactttcgccataatcaactgctactttttgcccagcatgagcacgatctaatactaatttaccatttttggtatcgaaattgagctgtaaactgttacttaagtcattatttgcagctaaatgtaaagtgccactttggttagccttaattgttaattcaagttcaaattgttggccggcttgatcgctgactacttgattagatatgcttgcttcgtttttgcggatactgcttattgccttaactggcgtttgaattaacttgtcactctttaggtggagttccttcacttgactcaagcagttagcccagttttcatcatcagtagggtaagtagtgtcaggcaagccaacccaactgacttcgtaggcattaccatctggggcgttaaaggcctgagtggcataaacatcgaacccgtgatccaaattgtgtaatttacctggattaattaacttatgattttcccagtcaatatcatcagcaataacgtacatatttgggtaaatgtcatcataagctgctacttttttgtctaaaccctgaggacagaaaatgaccacgactttgccatcaacacggacgatgttgggacactcgatcatgtagcccatgtcttcgttggtaaagtctaagaagcccaattcttcccagttctttagatcctgagacttccaaacgtcaatgtgaccgtgtttttcctttttatcttgggcacctaaaattgcgtagtaagtgtcattttctttgataatttggggatcgcgaaaatgttcggtgatgtgatctggattcttaaataggatggttttgtctgaaactttattatttttatccatccaagcaccgatttgataaggagtacgtacccaattttcatcgcggtggttaccggtatacatgatgaaaagcttaccatcgatttcgcgagcagagccagaataagctccatgtgaatcagccattgtgtctggttcaatacctaagcctaagttttcccagtgaaccatgtcagttgatttgaagtgccaccatgactttagaccgtgaactgcgccgaatggatatgattgatagaagaggtggtaagcaccatcaaagtaggaaaatccattagggtcattaattaagccagaaataggatgcaaatgatagcgcatttggtaaggggagtttgcggcttgtgcttgcaaatgcattaatgtatcagcgtcccaatcttgataaggtaagtaacgtttttctcttgtccattccataaatatacctccatgaaagcgttgtctttttacatgtattttaagttagtatgaaaaatatgtcaaacgtttaacagaaaaaataattattaattcataagtaataaaataaataaagaattttatgtcaaacgattgacatattttttgaatgcgttatcataattagtgaattgagaataaaacgtttacataggagggatcaatatggaccacagaaaagtggctgaacgagtaattaaagacgtcggccgtgacaatattattgccggtgcccactgtgctactcgtctgcgtttagtattaaaagatgattcaaaagtcgaccaaaaagcattggataatgatccagatgttaagggtacttttaaaaccaatggtcaatatcaagtaattattgggccaggagatgttaatgacgtttacgatgagttcattaaaatcactggtttgaaagaattatcaaccgatgatttgaagaaggttgctgcagaaggtaaaaagaagaatccagtaatggatttcattaaacttttgtctgacatctttgttccaatcattccagccttagttgctggtggtttgttgatggctttgaacaacttcttgacttcaccaggtctgtttggaccaaagtcagttgttcagatggtaccgaatgttgctggtatttcaagtatgattcaagttatgtcagcagctccgtttatttttatgccaattctagtcggaatgtcggcagctaaacggttcggtgctaaccaattcttgggtgctacaatcggaatgattatgacgacacctggactccttggtgcaaatcacttctgggacatttttggcttgcatgttgcgcaaactaactatcaataccaggttattccagttttagtagctgtttgggtattgtcaattttggaaaagtacttccacaagcacttgccatcagctgttgactttacctttacgccacttctttcaattatgattactggctttttgacttttacaattattgggccagtcttcaaaggcgtatcagatggtattaccaatgctatcgtttggctatatgacactactggtgcctttgggatgggtgtctttggtcttacctattcagctattgttactactgggcttcatcaaagttttccagcggttgaaactcagcttttagcagcctttgctaagaatccagccagctctggtgactttatctttgttaccgcatgtatggctaacgtagctcaaggtgccgcaactttcgctgtttacttcttaactaagaacaagaagatgaagggctgggctagttcatcaggtgtttcagcacttcttggtattactgaaccagcacttttcggtgttaacttgaagtataaattcccattcttctgtgccttaattggttcaggtgtagctgctgcttttgcgggcttgatgcatgttactgcagccgctcttggttcagctggtttcttaggcttcctttcaatttatcctaagactattccaatgtgggttgtttccgtattaattagttttgctgttgccttcatccttacttatgtttatggtaagggtcatttgaaggaagaagttgctgaacaagatgttccagtaaacgacgcaactgattatgctgaagaaactcaaaaggctgaaaagcttggtaaggaacaaatggcattaaaggatgaagttattgcttcaccagttgatggtactcctgagagtttaactaaagttaatgatcaagtattctctgctaagttaatgggtgatggtgcagccgttattccaagtgatggtacgatctattcaccagttactggtactgtgactattgcttatgaaactaagcatgcttatggcattaagtcagacgatggtgcagaagtattgattcacattggtcttgatactgtaaaccttaagggcgagcacttcgaaagtttcgttaagcaaggtcaaagagttaacaagggcgataagcttggtacagttgaccttgatgctgtgaaaaaggcaggctatgatactactgtcatggtagtaattactaacactgccaactatgcaaatgtttcaagaattactgatgcgggtgacaagcacggcgacaagttgattgctgttactgcacacaattagtttcttctactcctctagaaaaaattaaaacaattagaataaaagacgctaagaaagattgtttcttggcgttttttagtactaagtgttgcacttcaattttaagtttgagtaaaatgttctctataaagaaaaacaaagtgagggtatgttttatgaagttaaaaagtggagttattggagtattagtaactggattaactgtctttagcattaatctaactagctctaaaataaaggcagcgataacagtgcctaatcctaagacagattatgtagttaaaactacttctaatgtgtataagagtaatggtaagaggaccagttttaagacacgtggtcagatacaaaccggtaatgttccagtaattgaatcacaactatatgaaggcaagttcattaatgtgcaaggaactaagacgattaatggtactgcttattataagatcggtcctaacgcatacattaaacaaaataatgttttaaattatgctcaagaaaaagcaaagcttgaggcatatcaggcacaagatgatgtgaatgatgattcagatcagtcaacagaattaagctctgatgatgtgaattttgacatagcttggtatgacaacattaatgaggatccatctccagcgatgttcgatgattcaggatatcataatagagtgattaagaatgctcgtaaattattaggctatttcacttatggaacaggtgcataccgaactaattttggcagttggcgtcatcctaataaaaacggttcaactgattgttcaggatttgtgtggatcgtaatgaagagagcaggatatcgtgtaggaaatgctccattttttactctgccaatggaacgagatgctaaaagtactcatggctatttgaagaaaatttctgccaagaatattcgcccaggtgatattgtgattgttaatactggcaatggtgttggtcaaaacggacatgcagcaattgttgatggcaaatatgatggttgggacacgcaaattattgaagagggcggcaacttaggtgtagatgatgtgcaccgctctagtttaggtagctcactgagcgataagctggccaaaggtcgaatcacttatgctcgccccgttaaatagtatgctctatgctataattttgctaatcaataaaggataataagaatgaaaaagaacagcacgcttaaacatgtctggattatgacggctgtctattgggtagtaggtattctaagtattttctggggtaagcttgatcatacttttgcgtctcaattaaaagagatcaataatatttacgtgttagttttaataattatcttaagcttgccgctacttttatcgctgttattgtcggttaaagtaaaaatgccacgtttgatctgcaatccactagttgctgtaatttatctattagtggtaattgcagcaggtgtagcatataacttacaaaatattattggctacttcttcccaatcatcctcttcattattatggcgctagttgctgttttctatgctttggttaagacttttagcagcagaaaaagtggtaaatatttttttattgatggtaaagataagaaagaatgccatgatttctgggatgcttataagaagtactatgtaatgggattaacttacggcattattgatggtttgattactgtaattagttaaaaaagttaagaaaaatcaaaattagcactcaattaaaaaaagtgctaattttttcttgctttttttcacaaaacagtttattatcatatttgtaagttagcacttagcaaataagagtgctaatgattaatacagtaataaaaaatataatgaagaaaattaaacataagggggactaaacgtgttacaaccaattggtgatcgcgtgatcgttaaagttaagaaagaagaagaagaaactgttggtggcatcgttttagcatcaaatgctaagaagaagccaactgaaggcgaagttgtagctgttggtgaaggtgcttacgcatcaaacggtgaaaagattccaatggctgttaagaagggtgacgtagttctttacgataaatactcaggcactgacgttgaatacgaaggtgaaaagtacttagtccttcacgaaaaagacattttagctattgctaagtaatttagttaaaatttccaacgataattaagtaaattaaggagcatagataatctatggcaaaagatattaaattctcagaaaatgcaagacgttctcttttaaagggtgttaataagttagctgatactgttaagactactattggtcctaagggtagaaacgttgttttggaacaaagttacggcaaccctgacatcactaacgatggtgttaccattgcaaagtccatcgagttaaaggatcactacgaaaacatgggtgctaaacttgttgctgaagctgctcaaaagactaatgatattgctggtgacggtactactaccgcaactgttttgactcaagcaattactaatgaaggtatgaagaacgtaactgctggtgctaacccagttggcattcgtcgtggtattgaaaaagctactgaagctgctgttaatgaattgcacaagattagccacaaggttgaatcaagagaccaaattgctaacgtagctgcagtttcatcatcttcaaaggaagttggtaacttaatcgctgacgctatggaaaaggttggtcacgatggcgttatcactattgaagattcacgtggtatcaacactgaactttcagtagttgaaggtatgcaatttgatcgtggttacttatcacaatacatggtaactgacaacgataagatggaagcagatcttgataatccttacattttgatcactgacaagaagatctcaaacattcaagatatcttgccacttcttcaagaaattgttcaacaaggtaagtcattattgatcattgctgatgacgttactggtgaagctcttccaacacttgtattgaacaagattcgtggtaccttcaacgttgtagctgttaaggctcctggctttggtgaccgtcgtaaggctcagttacaagatattgctgctttgactggtggtactgtgattactgatgacttaggtcttgaattaagggacactaagattgatcaattaggtcaagctcgtcgtgtaactgtaaccaaggactcaactactattgttgacggtgctggttcaaaggatgctattcaagaacgtgaagattcaatcagaaagcaaattgaagaatcaacttcagactttgacaagaagaagcttcaagaacgtcttgctaagttaactggtggtgtagctgttatccacgtaggtgctgctactgaaaccgaattgaaggaacgtcgttacagaattgaagacgctttgaactcaactcgtgccgctgttgatgaaggttacgttgctggtggtggtactgctttagtagacgttgagaaggctatcaatgatcttaaggctgatactgcagatgaaaatactggtatccaaatcgtattaagagctttgtcagcaccagttcgtcaaattgctgaaaacgcaggtaagaatggtgaagttgttttgaaccacttactcaagcaagaaaacgaaattggctacaatgctgctactgatacttgggaaaacatggtagatgctggtatcattgacccaaccaaggtaaccagaaccgctttgcaaaatgctgcttcaattgccgctcttctgcttactactgaagctgttgttgcagaaattcctgaagaaaagccagctaacccagctccacaagctggtgcaccaggaatgggtatgtaattatatatcttaatgctttagcatttagatatataattcttgattacgaagtaatcaagttcatttacagtgctttagcactaaacttatgcacaaactctcactctagttcaaaaacaaatataattaaaatgacttcgaagttaaacaatcagttcagcttcgaagtttttctttttgtagcgtataatattgtacgtaactctatctaaaatacgaaataggaaagagacataaatgacggaaaaaacaactccaatgatggagcaatattacgaaattaaaaaacaatatcctgatgcctttcttttttatcgcgtcggagacttttacgaactgtttgaagatgacgcagttaaaggtgcacagattcttgaattgactttaacgcaccgatcaaatagaactaagaatccaattccaatggcaggtgtgcctcatatggctgtggatacttatgtaaatactttagttgaaaagggttataaagtagcactttgtgaacaacttgaggatcctaaaaaggccaaaggcatggttaaacggggaattattcaattagtgacgccgggaaccatgatgaatgaaggcccaaatgatgctaaagattcaaattacttaacatcagtaattaccactaagagtggctttggtttagcctacagtgatttatccactggtgaaatttatgctactcatttaaagagtttcgatgctgtttccaatgagctcttgtcacttcgtactcgtgaagttgtgtataacgggtcattatctgaacaaaataaagactttatgcacaaggccaacattacgatttctcgacctactccaattgaaggtgaacatgctgaaatttcttatgttgaacagaatttgactaatggggctgaaaaagaggctacccgtcagttagttggctatttgctttcaactcaaaagagaagtttagcgcacttgcagattgccaaaagctatgaagtaaatcaatatttgcagatgtcacatactgtgcagaataatttggaattggttgcttctgccaaaactggcaaaaaaatgggttcacttttctgggttttggataacacacacactgccatgggtggacgcttgcttaagcagtggctagctcgtccattattaaacatggatgaaattaaccatcgtgaagaaatggtgcaggccttgcttgatggctactttacacgagaaaatgcagttgatgccttaaagggtgtttacgacttggaacgtttaactggtcgaattgcttttggtaacgttaatgcgcgcgaattactacaattatcacgttctttgcaggccgttccagttattttagatgctttagagcaatcagattcagatatcttggtcgattttgctaaaaaaattgatccattaaagggcgttgccaaaatgattacttccactatcgtgaaggatccacctgtgttgactactgaaggtggcctgattcaaggtggggttgatccgcagcttgatcgctatcgggatgccatgaacaatggaaaaaaatggttggctgaaatggaagcagatgagcggcaaaagacaggtattgataacttaaaggtcggttataacaaggtctttggctattatattcaggtttctaacggtaacaagtctaaggtgccacttgatcgttatacgcgtaaacaaactttgactaacgctgagcgttatatcacaccggaactcaaggaacatgagaatctaattcttgaggcacagacacggtcaactgacttggaatatgatttatttgttaagctgcgtgaggacgttaagaagtatatccctgctttacaaaaattaggtgggcaactagcagcgctggatgtttattgtggttttgctacagtagctgaacaaaataattattgccggccaacttttcacgcagataatcaagatattaatgtgactaacggccgtcatccagttgtggaaaaagtaatgacggctggttcatatattcctaacgatgtcaaaatggatgaaggaaccaacatttatttaattacaggtcctaacatgtctggtaagagtacctatatgagacaaatggctttgattgcgatcatggctcaagtaggttcctttgtgccagctgatagtgctgatttgccaatttttgatcaaatttttacaagaatcggagcagctgatgacttaatttcaggtcaaagtacctttatggtagagatgagtgaagctaatgaagccttgcagtatgctactaagcgcagtttggttctctttgacgaaattggtcgtggtacggctacttacgatggaatggctttagctggtgcaattgttaagtacttacacgacaaagttggtgctaaggcattatttgctacgcactatcatgaattgacagtgatggatgagactctggatcatctgaaaaatattcacgttggtgctaccgaagaaaatggcaagttaatcttcttgcataaaatcctacctggacctgctgatcaaagttacggaattcatgtagctcaattagcaggtttgccgcgcaacgttttgcgagaggcaactaaattattaaagcggcttgaagcacaaggcagtgaactagcaccagtttcgcagcaattagatttatttgcagagcctgtggaaaacagtgttgaagaaactgaaacacaaaatgacaagcccgcaataactgatgcacaacaagatatacttgatgatatttctaatctttatttagcagataagacaccgttgcaggttatgcaaatggtagctgattggcaaaaagatttaaaggatgacgattaatgagcaaaattcatgagttatcggaaactttaactaatcagattgcagccggagaagtaattgagcgcccagctagcgtagttaaagaattagtagaaaactcgttagatgctggtgctactcgaattcgcgttgattttgtagatgctggtttgaaacagattgtagttcaagacaatgggacggggattgcacgtgatcaagttgatctagcctttacccgacatgcgacaagcaagattgccaatgaacacgatttatttaaagtttccactttaggcttccgcggagaagcattagcttcgatttctgctgttagccatgtggaaattctgactgcaactgaaaacgcaattggtattcgagctaactatagtggaggcaataaaaaaggccaagaagatgcagcggctcgtaagggaacaaaaattacagtcaaggatttgttctttaacacgccagccagattaaagtatttgcgtagttcaagaactgaaattatgaagattgtggatattattaatcgacttgtgttaggttatccacatgtgtcttttactttgtcaaatactggcaaaattttattaagaacgccaggaaataataatttaaagcaaacagttgctaacgtgtatggccgtcatatcgcagaaaaaatggaaaaatttgaggcaaaagacagcgattttaagattacaggtctgatgtctaaaccggaattaacacgttctacacgcaattttatttcgattctcttaaacggccgctatattaaaaattttcaattaaatactgcgattctggatggctatggctcaaaattagcagcgcggcattatccgattattgtgttagcaattaaagtagatcctttgttagtggatgttaacgtgcatcccactaaacaggaagttcgtttatccaaggaaaaagaactgggtcgtttaatcaccagtgcaattagtaatacacttgtggaaaaagttggacaaattagcgcttttgctaatttggaaaataaacgtgatacgctagttgatcagcttagttttaacttaaatcaagatgttgtaaatacagctcgtaaaaaagaaccggaaattcgcgaacaagaaaagccaaaatttttaacgattgaatctgatgattcagaagataatattcaaaatgaggcggtaaagcaggatagtgaaaagaaatatgttgatcttaatcagccacgtgaagatgatcaatatatcgttactaagacctggaaacaaaatgttgctctgcagcaagcactaacgccatttcctacaactaggactaatcaggaagtcatttcaagtggggatgaaactttagctaataatctgcctcgcttggtttatgttggacagaccgatacttatttatttgcccaacataatggcgacctatttttaattgatcaggttgctgctagacgaaggttaaaatttgagcaaatttttcacatgataactgccaaaaaagtagtacaacaaggtttgttaacaccaattattttagaatttggtaatcttgattttatgcaaattaaggatcaagtagaacagattaagcaggttggaatctatttggaagattttggacaaaatagttttattgttcgttcgtatccaacttggattcacgataatgtcgaagattcaattcggaagattttagatggttatttgaatgtggataaaggaaaggcaaagaacctgtttagccggatagcagcaatgcaagctaagcgagaaattactggcaagattaaattatctgcagctgaagctgagcaaattttacttgatttacgcaagtgtactgatccatatcatgatgcagatggacggataattttggttagaatgagccaaaatgaattgagaaaaatgtttaagaaggatgaataatgtacgaatattttgaaggtgtgattactgtggttacaccaagctatgttgtagttgatgtcgggggcgttggctacaaggtctatagtcctacaccttttgcctatactcaaggccaaaaagctaaggtctttattgagcaagtggtgcgtgatactggcattactttatatggttttcaaagtcaagatgataagggcttgttcttaaaactacttagtgttagcgggattggtcctaagagtgcaatggcaatcatggcagctgaggatagtaattctttggcggaagcgattgaacaaggtgaagttaagtacctaactcgttttccaggtgtgggtaaaaagacggcttcacaaattgtgcttgatttgaagggtaaattaggtgattatgttgctcggcttgatcgtccagacaatggtgagaatgtgccgccagcattaaatgatgcactgcttgctttaattgctttgggttatacccaaaaagaagtggatcggatcacgcctaaactggagaaagttgctgcaaatactgcagatcaatatattaaaaagggcttagcattactgcttaaaaagtagatcttggtataatagaacagatgattattttttaaggaagtgaaactggtggcagaagatcaagtaacttcaggtgatattgagaatcctgaagaacaacaaatggaactttctttgcggccgcaaacgctcgaccagtacttaggtcaaaagcgggtcaaaaaagaaatgagcatttatattaaggcggcgcgccaacgtgatgaagcattagatcacgttttgctttatggaccaccggggttaggaaagacaactttggctttcgtaattgccaatgaattgggagttcatttaaagagtacaagtggtccggccattgaaaaggcaggcgacttggtggcacttttgtccgacttagatcctggggatgttttgttcattgatgaaattcaccgtttagctaagccagtagaagaagtactctactctgcaatggaagactactatatcgatattgtgattggcgaggggcagactactcatgcagttcacgtgccgctgccaccatttactctaattggggcaacgactttggctgggcaattgtcagcacctttgcgtgatcgctttggcatcgtagagcacatgcagtattacactatcgatgagctagaacaaattgttttgcgttcaagtgatgtttttcacacttcaattgcgcctgaggcggcccatgaattggcacgacgctcgcgtggtacacctcgtgttgccaatcgcttacttaagcgggtgcgtgattttgcggaagttaagggagaaaaaacaatttcgctcgagactactgaaggcgcgttaaaacaattgcaggttgacgatgagggacttgatcagacagaccgcagattattgagaacgatgatcgaaggatataatggtggtcctgttggtattcggactttggcagctaatgttggtgaagatatggaaacgattgagtcactatatgagccatatttgttgcagcatggttttattttactcacgccgcgtggcagaatggtgacggataaagcatatttacagttaggattaccaattccaggtgataaatagtcccattttctgtataatggttataatatctagaaaataattttaatgaggtggaaattttgaacattttatttttagcaaatgccggtgctgcagcaagtagcaactggatgatgatcggtttatttattattttgatcgctttcacttactttggtatgattcgtcctcaaaagaagcaacaacaacaaagaatgcaaatgatggacaaattgaagaagggtgacgaagtcatcttagttgatggtttgcatggtaaggttgacaagatcaacagtgataagactatcgtggttgatgcagatggcatttacttaacttttgaaagaatggctgtccgtcgtgtgattccagttgctgcaccagcaactcctgcagctgaaactaaggctgaagctccagcagaaaagccgaaagaaaaagcagacgaaactaaaaaagaggataagtaatcatattacttaagagcgtcattttaggcgctttttgttttgctaaaaaaatccttgttgtaaaatagaagtgataattttagttcaaagaaagggatctgaaatgaagaatattcccgttgtaatgattctttttggtggtagtggtgatttggctcaccgcaagctttatccagctttgtttaatttgtatgaacaaggcttaattcacgacaactttgcagtaattggaactgctcgtcgtccttggtcacatgagtatttgcgtgagcaggttagtgatgctattcatgaaacgcacgatactgttgatgaaaatgagttgaaagcttttgcaagtcatttttattatcaatcacatgatgtaactaatgtggaacactatgagattttgaaaaacttggcacaagagctcgatgatcgttatagtgcacaaggcaatcgtctcttctacatggctatggcaccaagattctttggcacaatagcaacgcatattaatgaccaagacttgactggtagtggctttaatcgaattgtagttgaaaagccatttggtcatgatttggcttcagcagaggaattaaataagcaaatcacggcttcatttgatgaaaatgatatttttagaattgaccactatttaggtaaagaaatggttcaaaatatcatgccaatgcgttttactaacccaatggttcaaaatatttggtgcagcaagtatattaagaatatccaagttaccttggcggaacgtcttggcgtggaagcacgtggaggttactatgatacttcaggtgctttgcgtgatatggtacaaaaccatatttttcaaattattactctgctagcaatgccagaacctaaggatctttcttctgctagtgttcaccaagccaagcaagatttgcttaagagtttaattattcctacgccagatgatgtcaagaaatactttgttcgtggtcaatatttgggtagtgatactacttttgcttataagcaagagccaaatgttgatccagagtcaactactgaaaccttcgttgcaggtaaagttaagtttaatgagggaccaattgctggcgtaccaatttactttagaacgggtaaggaatttaaagaaaagaagaaccggattgacattgttttaaagcatattaataatccatatgggcaagctcattctaacaatattacgatcgtgattgacccaactagtgaaatttactttactattaatggcaaacgaattgaccaaccaggaattcgccgtgaaaacttaacttatgaattttcaaaagccgaaatggctaaggtacctgatggttatgaaagattgcttcatgatgtttttgtcaatgattcaactaactttacgcactggagcgaattgaagcgttattgggaatttatcgatgcagttgaagatgcttggcagaaggaaaatgaagcaggcaatccagccattgcacaatatttgccatacagaatggggccaaaggaagctaatacaatctttgagtcaccaactgaacattggatttatgaataaagaaaatttattaccgcaaaatgacatccatcgtcggattattcatctggacatggatgctttttatgcttcggttgaaatgcgggagcatcccgaatggaaaaataaggcattgattgttgggcaagatccacgacaaaatggtggacatggagtagtggctacttgcaattatgtagctcgtaagtatggcgttcattcagctatggccgcaattcaagcagtacgtttggttcccaaggagctaatagtttttactagaccacgatttgataaatatcgtgcagtgtcagctaaaatccattcttttatgcatgatgtgacagatcaggttgaatcagtggctttagatgaagcttatctagacgtgacacatccaaagatagagcaggagtctgcagttcaaattgctttagatttacagaaaaggattcggcaagaagtaggcttaaactcgtcttttggcgtttcctataataagtttttagctaaaatgggatcagaatacgccaaaccgtttggtcgaaccgtaattttgcctagtgaagtgcagaactttttagcaatgcaaaagattgagaagtttcctggtattggaccgaagacgcaagaagagctgcatcagatgggtgtttatactggggcagatttacaaaaaattgaggttttaaccttaattaaaaaatttaagaaaatggggtatattttagcccaacatgcacgtggaatagatttaagacctgttgttacagactcagaggctaatcgaaaatcaattggcatggagcggacttacgagcctgcaatttatactgaggatgaagccctaaccaatattcgtaactattgcaatcatttggaagcagcattaaaaaaacgcaattttaaggcaggtactgttgttattaaagtaagaaataataattttgatacggtaaccaagagaaaaaagttgaaaacaccttctgatagtcacttagatttttatgatgtggctcgtgacttgttcgaagcaacaagttcctttttagatgatggaattcgtttattgggagtcactgtaactgactttgaaaagaaaaaatatcaatcaatcagtttgttcgactaataaataaagctatttttctggtaaactagatacagatatttttacaagatgaggagattaaaaatgagtagttttgatgacatttatgaaaaaatcttacaatatcctacaattatcttgcaccgccacactagtcctgatccagacgcaattggttcacaagctggtttagctagagcattaatggaaaaattcccggacaagcgcatactttgtgctggggaaaacgatgaaggcgacttagcttggattaaccacatggatcaagtcaaggcaactgattacgaaggtgctttggtaattactactgataccgctaatacaccaagaatttctaataagttgtatgataagggtgactttttaattaagattgaccaccacccagatgttgatccatatgctgatatgagttacgtagatccagatgctccagcagcatgccaaatcattgtagacttcttgaatgaagagggctttaagattaccaaggaagttgcttacccactttatgctggaattgtaggcgataccggtcgtttcatgtatccagaaacttcagagcatacttttaaggtggctgctcaattagcttctactggaattaacattactgaaatcgctcgtaatattgctgatgtaacttttgatgaggcaaaattgcaagccttggcaatggacaagatggaaattgatcccgttggtgcagcttttacaattttgatgcagtcagacttgaagaagttaggtttgactgatgatcaagcaaatgttgctgtatctactccaggacgtattaaagatgtgcttgcttggaatgtttttgttgaaaaaccagatggtactttccgcgtacattaccgttcaaagggccctgtaatcaatgaattagctgctaagcatgatggtggtggtcatgcattagctagtggtgctaacgctaaggatatggacgaagtaaagcaggtatttgcggaagtcgttgaagtaactaagaagtttaaagaagatcatgaataatatttttatagattcaagaattaaaccagctattcaggctggtttaaagaagatccattttgaaaagccaactaaggtgcaggagaaagttattcctgctatgttgtctgacttgagtgtagtagtgcaagcagcaaccggttcaggaaaaacgcatgcttatttagtaccaatttttaatgaaattgaagaagataaacgctatgttcaagcaatcgttactttgcctagtcgtgaattagccgatcagctttatcaagtagcacggcagctccgtgatgcggcagggatgcatttttcaattgcacatcttgcgggcagaactgatcgtgaacgtcaattagaaaagtatcaaaataatactccacaattggtgattgcaactccaggacgtttgttagactttgttcaaaagaaggtttttgcagttgatcaagtaaaaacttttgttatcgacgaagctgacatgaccttggacatgggctttttgaacgacattgatcaagttgctgctaaattgccgaaggatgtccaaattgctgccttttcagcaactattccagttaaattgtctaactttttacgcaaatatatggctcatcctgatgatatcgttattgataatcctagtgttattgcgccaacgattaaaaacgatttgcttgatattggctcaaaggatcgcaagaatgtcttgtacaaattgttaactatgggacaaccatatttggcgttggtttttgctaacactaagcaaaaggttgatgagttgactaattatttgcaagatcagggtttgaaggtagctaaaattcacggtggggtaactgaacgtgaaagaaagcgtactctgcgtcaggttgagcaaggacagtatcaatatgtggtagctagtgacctagctgctcgtggcttagatattgatggtgttagtctggttgtcaattatgaaataccacgtgatattgagtttgtaattcaccggattggtagaactggccgtaatggtttgtcaggtcacgccattactttgattcgtgaagaagaaatgaaccggattgaagacctagaaaaaatgggtgttcattttgactttgttgagattaagaatggtgaattagtgccacgtaaacactatcgcagtcgtgaaaatcgtcaaagcaagaatcgtaagcttgataccaagctggtgggttacgttaaaaaagagaagagaaagcgtaagccaggttacaagaagaagattaagcgtgcgattcaagaggataatcgtcaaaaacgtaagttggaacagcgtcatgaggttcgtaaggcaaaacgtttgagaaagcgcaagcgtgaacaagggctttgacagaagcggattttgtagtacaattatttcagcttaagatatgttttttgatcaattatttcaaagagagagccagttagatgagaatggcttaataatagtcaaaaaatgctcctttaagtttcataattaagaatatcaagaggtaacaaacactgttgcaatcaaggtggtaccgcgcgtggagcgtccttgaagaaagcaatagtgttttttatttatttttagggagatttattttaatgaagaaactaaatagttcagagtttcgccaaatgtttttagacttcttcaaggatcatggtcacatgattatgccaagtgcatcattaatcccacaagatgacccaactcttctttggattaactcaggtgttgctaccatgaagaagtactttgatggctcagttgtaccaaaaaatcacagaattacttcatctcaaaagtcaatcagaaccaacgatattgaaaatgttggtaagactgcacgtcaccaaactttctttgaaatgcttggtaacttctcagttggtgactactttagagatgaagctattccttgggcatgggaattcttaactagtcctgattggcttggcttgccaaaggaaaagctttactgtactgtttatccaaaagatgaagactcatttaatgtttgggtaaaggcagggatgccagctgatcatattgttaagttggaagataacttctgggatattggtgaaggtccatgtggtcctgatactgaaatcttctacgaccgtggtcaagaaaacaacgacgttgctgaagacgatccagaaaacttccctggtggtgaaaatgcacgttaccttgaaatttggaacatcgtattttcacaatacaaccacttgccaaatggcaaatatgtagaccaaccacacaagaatatcgatactgggatgggactagaacgtgtgctttctattttgcaagatgcaccaaccaactttgaaaccgacttgttcttgccaattattcacgccactgaagaaatgactgatgacaagaagtacggcgttaacaaggaagacactactgctttcaagattatcgctgaccacgttcgtgccgtaagttttgcgattgctgatggtgcgcttccttcaaactcgggccgtggttatgttcttcgtcgtttgatccgtcgcgcagacttgaatggtcaacgcttaggaattaagggtgccttcctttacaagttggttccagttgttggaaaaatcatggaaagtcactacccagaagttatggatcaacgcggctttatcgaaaacgttatccaaaacgaagaagaaagatttcaatcaactcttgatactggtttgactttgcttgacgacttaatcgacaaggcaaagaattctaaggataagaccatttcaggtaaagatgccttcaagatgttcgatacttacggcttcccatatgaattgacttttgaatcagcacaagatgctggccttaaggttgacaagaagggctttgatgcagaaatggctgctcaaaaagagcgtgcacgtaaagctcgtggtgaccttcaatcaatgggacgtcaagatgtaactttaatgaacattaaggataagtcagtctttgaacgtgatacttacgaagaaccacatgcaaagctagttgacattgttgttgatgataagttggttgataaggccgatggcgaacatgctactttggtctttgacaagactccattttacgcagaacgtggtggtcaagttgccgaccacggtgacatttacaaccaagacggtgaattggttgccaaggttactgacgtacaacacgctcctaatgaccaaaacttgcactttgttgatttgattttgccagttgaaaagggtcaagaatacgtattgaagttagataaggaacgtcgtgaagggttacgtcactctcactcagcaactcaccttcttcacgctgctcttcgtcaagtcttaggtgaacacactcaccaagctggttcattagttgatcctgactacttaagatttgactttactgcaatggaaccaatgaccaagcgtgagcttaagaccgttgaagaattggttaaccaaaagatttgggaagctattcaagttaagactactatcactacccctgaagagggtgaaaagatgggtgctttagccctctttgatagcaagtacggtgataaggttcgtgttgttcaaatgggtgacttctcaagtgaattctgtggtggtactcacgtggacaatactaaccaaattggaatcttcaagattacttcagaatcagctgtcggtgctggtatgcgtagaattgaagctgtaacttctaagaaggcttatgaatacttggcaaaccgttcagacttacttgatgatattcaagaagaagttaaggcaaccaagccagataacattgtcgataagattgattcacttgaaagtgatttgcacgatgctcaaaagcaagttgaaactttgaacaagaagatcaatgctgctaaggctggtcaaatctttaatgacgttaaacaagctggtgacttgactgtcattgctgctactgcagatgttaacgggatgaatgacttgcgtgaacttgctgataactggaagagcggcaacaagtctgatgttttagttttagctgctgaaaatgctggcaaggctaatatgattattgctttagaccaaaaggcattagacaagggccttaaagcaggtaacttaatcaagatcgctgccccaatctttggaggtggcggtggcggccgtccaaacatggctcaagccggtggtaagaatccagcaggcttgaatgatgctattaaggcagttattgacgaaatttctaagaactaagaattaattaattgtgtttaagctttttttcaagtaaaattgttgacaggaggaataaatatgagttcgctagataagactatgcattttgactttaatcagaacaaaggaaaaaatgtttatgatactctgcaagatgtttacaatgcgcttgaagaaaagggctataatcctattaaccagattgtaggttacttactttctggcgatcctgcttatattccacggcataacgatgcccgtaatttgattcttaagcacgaacgtgacgagattattgaagaacttgttaagagttatcttggtaagaataaataatgcgtttattaggtttagatgtaggttctaaaactgtgggagtagcaattagcgatgagctaggaattactgcccagaagttggagactatccagattgatgaaagcagatataactttggtatgcgtccattgaagaagctagtcagacagtatgaagttgacggtttcgtattaggtttacctaagaatatggatggtacttctggtagttccgtagctagaagtaaggcatacggcaaacgactagaggaaaagtttggtttacctgtacattattctgatgagagattgacaacaattgaatcacgacgagtacttgttgaggatgcagggatccatgatcgcaagaagcgtaaacaagtaattgatcagatggcagcggtgctcatcttgcaaaattatttagatttacaccgaaaggattaaaatggcagcacaagttaatggtgacgatcaagatcgtcaaattactttgattgatgatcaaggtaatgaagaattgtatgagatattatttacttttcattcagatgattatgacaaatcttacgtgcttctttatccagccgctgttggcgatgatgaagatattgaggtgcaagctttcagttatgatgccgatgatgccggcgatgtaacaagtagtgatttgcatgagattgaatctgatgatgagtgggacatggtccagggagttttaaatactttcttagatgatgaccgcttgagtggtaaataataaaaagaggactggctgtggctggtcctttttgttagttttagaaaaaagataaaaatgaacaagaaaatattagagattttagaatttggcgaaattactaagcgcttgagtaaattagcgattactggtcccgctaaaaaagaagcggaggaattattacctagtggtgattttgaacaagtacaaaatgagttaaagcagactttagctttgactaatttgctacgaattaagggacaacttcctttaacggactttcaggacgtacgtccaagtactaaacgtttaagcgtgaaagctaatttaaatgctaaggaattaggtaatttattattagtattaagtttagctcatgaaattaatgactttttggcagaaatagatccaaacaaactggatttaactgcaattgatgaaattttagatcaattagatgtgccggatcttttatttagagaattaaagaaatcagttgattatgatggtgaggtattagatacagcctcacatgaactagctcgtttgcgtcatgatatacgttctaatgaagaggaaattaagaataagatggatgcttatactaagggcaatagtagtaagtatttatctgagcaaattgtgactattcgtgatgatcgctatgttattccagttaagcaagaatatcgggcaaaatttggtggggtagttcatgatcaaagtgccagtggtcaaacactgtttatagagccggaagccgttttaaatcttaataaccgccaacagaatttaattgctcaagaaaaacaagaaattcgtaatattttgaagcacttatctaatttggctcgtgaagaaattactagtttgaataatattgcggctgcattaactgaactagatttcttgcaggctaaagccaagttagcaaaagaaatgaaggcaagtgagcctcgtctgacacaagaccattctttgaacttattaaaagcgcgtcacccattgattgacccagaaaaggtagtacctaatgacattcgtttaggtggtgaatttgatactatgctgatcacggggcctaacaccggtggtaagacaattaccttaaaaacagcaggattgcttcaattgatggcacagtctggattatttatcccggctgaagaaggtagcaaggttggcgtctttaagcaagtttatgctgatattggcgatgaacagtcaattgaacaatcgttaagtactttttcatcacatatcaatgacattattgcgatcatgaagaatgttgattctgagaccttagttttaattgatgaaattggtgcagggactgatccagaagagggtgctagtttggcaattagtatcttagactttttgcgtaaaaaagatgctaagatcatggtgacaacgcactatcctgaattgaagctttatggttataatcggccacggacgactaatgcctcaatggaatttgacttaaagaccttgtcgccaacttatcatttgcagattggtattcctggtcatagtaatgcctttgccattgcccgcaagctagggatgcgtgaagatgttgtcaaaaatgcccagaacttaatgtcagatgaagattctgatattaataagatgatcaccaagttgaatacgcaaaccaaggcagctactgtggctcgcaatcgtctgcaaaccagtttggatcggagccaaaaattggagcaaaagttgcaacaagcacttgattggtataaccaacgtgtacaaaaacagcttgattttgcacaagagcgagctaatgaagttgttgccaaacgccgtaaaaaagctgatgagattattgctcaacttgaaaaacaaaagaacatgggcgtcaaggaaaataagattattgaagctaaaggcgaactcaacagtttagagcgtcaggctaataatttggctcataataaggtcttacagcgtgaaaaacgtcgtcaccatgtaagtgtaggcgatcgagtaaaggtcctctcatatggtcagacaggtacgattactaagaagttatctgaacatgaatatgaggttcagatgggaattatcaaagttaaggttagtgatcgcgatattgagaggattgaaaagggcgaaagtactaagcctagacaaactgttagagcaaccagtgcggttagaagaagtaatgctcatagcgagctggatttgcgaggccaacgctatgatgaagcaatgactaatttggaccgatatattgattctgttttactggcaggacttgatacggttacgattattcacggtattggtactggtgcgattagaaaaggtgtttggcaatatctccgcagcagcaatcatgtaaagaactttaattatgcaccagctaatgaaggtggcaatggtgcaacaattgtacaattaaagtaagcgtcttacttgcaaaaagtaagtataatagaatatacttataatataaataaatgaattgaaaaaatgtgaggtaataattatggttgaagcaattaatgatcaaaattttgaagaagaaactaagaatggtgtagcattagtagacttttgggcaacttggtgtggtccatgtaagatgcaatcaccagtaattgatcaattatctgaagaacgtcaagacgttaacttctacaagatggatgttgaccaaaatcaagatacagctaagaatttgggtattatggctattcctactttaatcgtaaagaaggatggcaatattgtagaccgaattactggttacactccaaaggaaaagttaaaccaaattttggatcaatatactgattaatttaaaaatcaaaaaaagcttgagacgatgttgcctcaagcttttttgatatatcacttattttgatttacttgcttttttagcaagtcacgaatttcttctaaatagtcggcctcagttggaccagcttctttttctttcttgggcattactctatttaaagccttgatcattaaaaataccacaaatgaaatgatcaagaagttaatgacagaattgatgaagctgccatatttaaatgtagcatccccaaccttaaaaacgaggttagaaaaatcaattttgccggcaaagatcccaagtagggggttgatcaagttttttactaaagattgtacgatagcagtgaaggcagcaccgatgattacaccaactgccatgtccattacattgccacgtgaaataaactctttaaattctttaatcatgctctactcctatatctaatatatctaaaaaaatgcgattttaactaaagtatatagtagtggttatttatagtctatcaatttgcttttaaccgaagcgagcgataaattgaactttcttttctttatctaaaatattaatttcacattcggtggttcgaccagttgatttttgaaatgcttccgcgatcattccgccttcaagggagaattccttgctggcgctattcaaacgatcagtgacagtttggccacttaattcgtaagtagtaaatgatcgtctttctttaactttttctagcttaccaaattcagccatgttgaagaattcaactaaatcatcataatcacttaaatcatattttcgcgcgattctcttgccagcccaataaagaattgaggcgtcatcatcgcctaaaatagttggcaaaaggaaatcgcggtaaagttggttaataaaatatacgtgctcgtttgtgttttctgtgttttctgtcataaacttgttcatcccttttattcttttttattttaccgtaaactagtataagtagaaaataaatttttgattttaagagggttttattatggataatcgtccgattggattattggattcagggctaggtggcctatctgttgcaaaaaaagtaattgaaaaattgcctaatgaatcaactgtttttattggtgataacgctcatatgccgtatggcgatcgaactaaagaagagattattgaactagttagaaaatcagtccattttttgttagataaaaatgttaagctgataatttttgcctgcaatactgcgacagcaatggctatgagtacgattcaagcagaaatcgatccacaaattatcggagttattcagtcggggagtttggccgcttcacggacaactaagaataaaaaagttgcggtagtttcaactaaagcaacagcagaatcacatgcttatgctaaagagatccgtttccgtgatccagaaattcaggtaacggaattagctgctcctaaacttgcaccacttgtggaggctcaaaaagatcatgaaaccaacttaaaagtagttaaagagagtttgacccccttacaaggaaaagactttgacactttaattatgggctgtacgcattatccattgattcagaaagaatttaaagaagcaattaatgataaaaatgttactatcttggatcctgcagatcaagttgcacagtatacgtttaatgtgatgcggcgcgatggtttgtttagtgatggtaatgaaaaagtcagtcatgaatattacactacaggcgatccaactagttttgatcatttagcaaggacattcatggatgatgcaactttaacatctaagcatgtggatacggagaatgaataatggttaaagaaattttatttgcgactggtaatcaaggtaaagcaaaagaactaaaagaagcctttaaacaagctggggtagatatcgagattaagacgaatgctgacttagacaatccgcctcatccgattgaaagtggccatacgtttgaagctaatgccaagattaaggcccatgaattagctgagtttagcaagttgcctacgattgccgatgattcaggtttaatggttgatgccttaaatggggagcctggtgttagaagtgcacggtatgcaggcgaagctcacaatgacgcaaagaacaacgccaagttattagctgaattaggcggtgtaccggatgaaaaaagaacggctaaattttggactacgattgtagtttcgatgccaggtgaatttgataaagacttggttgtgtcaggtacttgcagtggtcgtattttggccgcaccacgtggtgaagatggttttgggtatgatccattgttttatattccagaaaaagaaaaaacttttgcacagatgactactgatgaaaagaatgagatttctcatcgtggtaatgcagtgcgaaaattgctccaagaattgccagcttggttagaacaatttgattaaggtaaaaatagctcagttcgggtcattcgtatgatttgaactgagttatttttagtgaaatgaggtggatatatatgtcaaaaagtattggggaagcgctgaaagaggaaagacggtctttaggattaacacaggaacaatttattaaagggattattagtgaatcgttttattcaaaagtaggacgaggtaagaatgaaatagtagcagtagatttactaaagattttagctgctaataacattagtgaagaagaatttttaaataaactaaatgttaaggaaaataataatttagaggaagacttaaaagttcaattacttaatgcatattctattcatgataaaaagaaaatcagtatgttagtcccaaaaatacaaaatgcagctatggatgaaaatactaaaatatcagctcgtttgattgatgcagttgtaaataataagattaatgatttaactcaaagagaaattacacaaattaagagaaaattttttgaagttgatgattggaccaaaaatattacaaccttacaacttttttgtaattcaatgcttttgtttgattttgatgagctggttctttttgtaaaaaaactggaaaaaacatgtaaagggaagttgatgaaattaccatttaatactcaaaagataattgcatcgatttgcataaattattttcataattgttatacaaatgattgtagtcgaaactgtcaaatcttttgtgtaaatagttctttctcgtaaattgattttttaattatttatttaatcaaagtaggattctaaggtgtcctgaacctgaccaaagcctttatgaattcgattgaaataacggtcattgtagctcattgcctgaataccaataaaagcatcaagcgactgttcagttggaaactctgccttaggcttagctttgcgcttgatcacattgttaaatgattcaatcatgttagtcgaataaattgaagctctgatctgcttgggatagttataaaagaccagcagatctggttctatgtctttcaagcttctgataacatggctgtaaaccttgccccatttggtatagaagtcatgcaggacagctgtggcttcttctttgtttgtctgttgatgcacctgtttgaattcgttcatgatcttttcacgatcgtcgacgcgtactttagcgcagatattgcgcatgacatgaaccaaacagcgttgaaaatgagctttaggataagtcctggccaaggctgttttcatgccaacaacaccatcagaaagaaagagttcaacttgcttcaagcctctggacttcatgttttgaagcatctctgtccagacttcaatgttctcactaggagcaatgcagtagtcaatgacttccttatgtccattaggtttaatgccaatggcaatatagactgcttcacgctcaacgctcaaacgtttctcggcgcaaaggaaggtatgtcgcatccaaatagacgcagaaaaacttgtcgcttagcttgcgtttgtggtaagcctcaacctttggaatcatctgcttggaaatatttgatacctgagctggactgtaatggctgccatacatcttttcaattagatcggctatttccctggtggtcacgcccttggagtaaagcttgataatcatgctttccaagatatccgagtgctgcttgtagtcaggcagcgtgtgctgatgaaattgaccgttgcgatcccgaggcacttgcacttcaattgggccaaattgcgtatcaactttgcggaaataagcaccatttctagagttgccagtattccagccatttctggcatagggatcatagcccagaaaggcagtcaattcagcttctagcaagttattaacagcctgttgtagttctttgcgcaataaatcatttattttgtctggattgaatagagcttgagcaaaatctttggtaaaatcattcatgaaggagttcttctttctgtatgtgtttttttgttcaaaccaatcatacgagaaaggaactcctttttctaatgtttaaagaaataaatttaaggaatcattcatccttacacaaactattttacagtctcaagatgcaagctatggttatgaaataatagaagaattagctaatattccggattttggaatatatgtgatagttactaatttttataaggcatattttcaaggcaataaaaagcaaagtcaacagatattagatttcttgaatcagaatggactaaacgaaatatctagcagattgccatagtcatatatgaagacttaattcaaatatgaagagtattagatttttttaatgtttatactataattttaataattaatgtaactcttaggattagcctaagggttattttagtaacaaaattatttatgtggagaaagaaaaatgagatcgcaatatttccaagccacttttcgaattgcacgtaagtcgaaaaagaatatgttgcttgctgttttattggtactttgcatgatttttgctgtactggttgtagaaaagcagaaaatcaacgatggctaccgtcaatggcgagactacaatgagtcagttcatgttaatgcagattatttttctagcaatttgctacgaaaaaaggattacaaacaaacttttaataatctgaataaacaggctgagtatttggccggtgtacaaaatggtgaagtatttgattcgcctcaagattatttgcaaaattccaaaaagttagtgcaaacgatgctggcgggttatcaaaataattatcgcggtgcttcaacgctaaatgttccaccgaagtatcaactgcaacaaaaattagtagtttatgattatttgtaccaacatcacttagcaattgtcatgaattctaaagaatctagcacctacttaatctatattttaggattagtcggcatgttcttatttttctacgttttatttattgctagtgatagctggatgattaatttatcacatccaactctgcttaaaaatattccttatcagattagggatgaagttgaaggcaaatttatcatcaatcttgctttgactttgcttccgttagtgattggtgtgttaggaagttacttatttgctggttttaagaatggctttaatagtttgaattatccagcagttttgtatttcggtaaaattagcgcggttccactgtggctttattgtttgttgtatttagtctatgcagttgtactagtgatgtttgtgactagcctggcattgttgcttaatcaattaactcatagcgtttatctaacgatttttattgcggcattggtctacagtatttcacttttaccgggtagcattgctaaatatcttttctttttaccttcagcttatctaaatatcagtaaggttttagatgggactgttgcaagtcaatcaattattccggcaaattgggcagttggtatgactattttactagtgtgggctgtagtgctggtaatctggttcaggcatttggttaaccaaggtggtgttgaaaaatgaaaaggcaatattttttatttcaattaaaaatatttttgactaatcctaaaaatgtggggctgtttttcattaccgtcgtgcttgcactttactttggtttagtcagcgcaccgcagcatcatgtgattgaagatgttgatccatatgcaatttcaaaagaatatcaagatgatcaagcctttttaaaggtggctgaaaaagaatttgcacgggcagataaaggtacttcggattatgatcccagtgaaggtgctaaagatgctgttaccacatatccgaccatcattaagtatgaccatgagcgtttaaaagcacttaagaatcatgattggcgtttgtataccaaatacagtagcaagtggtatcagaaaatggataatttgatttgggttaaagaaaatcagaattacatgtatcccttggaatactaccacaataataattacaaagaagatggacatttttggtatcaaagaacatttcacttctatgatggtttacttaaaagtaaagcaaaattagacaaaaatgttttagaagaacggactactttacagagattacagcagtcgctttctgggtggacgatgattattttaattgtgattgttgttttgtttgcggcagatatgataaccaatgatcaaaaataccgtacagtagtgaagaatattcctctttctaaaaggacaattctttggctaaaaactgcggttattgaagtgggaattttatttaactttctagttgcttttttagtcgttacgttgtgtactgcgccaaggtatggttttggctcctttaatttattaacgccaatttatactggtcgtctgtatttcaaaacgccctttgtttatcagacgctgggacaatattatcttggtttcttgatctttgcagttgtaattacctttattttcattagattgactttattattgtcgctgatttttagaaatgaatatgtagcggctattatttcaagtgttttggcaatgagtgctaaagttctttatttttcattgggtatgggctttgtttatccatttttgaaacacttaccaatgacatattttacaatcggcgaaagtttgactagtaatttatcgtatttaatggactcaccaggttgggactttaatgatgggattattccgttagttacattagcaattgtaattgaattaactatttggctattttgtcagtttagaaaagtagtattagtgaagtaggtgaaaacatgttaaaaattcataatgttaaattagcttttggcgaacatgttgtcttagatgaaattagtttaaattttcaaataggaactatcgtaggtttagttgcaccaaatggtacaggaaaatccacactactaaacgtaattttacataatcttgagccacaagctggttatgtagaatatgatcatttacgttatcgcagcaatcgtgagattattaaactgcatcgactgatttgtgcttttcctgatcaaagtgatctgtttccatttatgagcggtagggatcatttaaagctttatgcggatctttggaaaaattcggataaaaatgtagataatattattaataaattacagatggaaaaatatgttgatcgcccaacacaaacttattctttggggatgaaacaacggctttgttttgccatggtggttgcagctgatacgccagtaatgcttttagatgaggtgatgaacggacttgatccccaaaacgtacaattgatttcagattacttattagatctaaaaaaagaaaataaattgattattatggcttcacatttgttaaataatctacaatcttacgcagatcgtgtacttttcttgaaggcaggaaaggtaattgaagatctcgataatcaacatcaggctaagcagtatctgaaaattgaggcgaatgcaatagccgggacgcggttaaaagataaaagatttactaagttacctgataataaaattattgtgccactggatgataatctaggattagatcaacttatacttaaattgactaaagagaagattccatattcagttggtcgaattgatttggcagaattatttagtaaattttatggctaaggcaatttgattagataaaaatagctcagttcgggtcattcgtatgatttgaactgagttactttttacttattttgcagtagtttttgcaggtcgttctgtacttgcaaaagcaatattattttctcgtaaaatttgaatatattgggtcaaatacaaatttttcacagcagattgtttaccaggcttaacttgaaaatgaatggaataaacaaattttttccctgtttgttcggtcacaccgacaatagtaggacctgatacaattgtctttttctcaggctggatcttacgattgcattctttgattaacttgttaacttcatcaatatcgtttttggtatcaagatccaaattaatgtctagtgctacaccgccatgggctaggttttgcacaatggtaatgttgcggttagggatgaaaataattgagccatctgaacccttgagacgagtagttctgaggcctagttgcacgacggtaccaacattagtgccaatctgaactaaatctccaacatcaaattggtcttcacttagaataaagaaaccgttgaccaaatcactaacaaagccttgtgcgcccattcctaaagctagggaaaaaattccagcactggctaacaaggtgccaactggtacacctagaatagagagaataccgaataaatagaagaagataagggtatattgaaaaacgctgttaatcaaagctgtgatagttcgagttcttttattcttaactgtgttatgcttggctaagtaattattaattattttatgaccaaaatgggataaaaggtaaaaaatgagtgaagtaatagctaattgccaaataattgacaataaattttggctaattttactccaatcaatttcaattttctgtatatttatgtgagtaggaatcttcatttggtgtcctttctattgcttacgggtataattaagaataacaagacattaattgagaataaaggatattcatgctaaactttttttagatgttgatggaggtagaaaatgacaatttcttatggtgctttagcaggcttaattgcggcgattgcattcttaattttagtattatttacgattccaatgctaattcggaccgcgaagttgttgaaagaaactagtgcaactattcaaacaactaacgagtcaatgaagaaaatttctgaagatatggatggcttgatggatcaaacttcggatttgttagataaaactaatgacctaatgaccgatgttaatggtaaaatgaagacgttagatccagttgttaaagctgctgcagatttaggcgaaagcgtatcagaattaaacgattcatctaaaaagatcgctaaacgctttagcagcaatcatttaagccgtacgggtcttatttcttcaatagctgcgacggcatttgcaagacgcaagcgtcgcagaggtgaaaattaataaaggaggaattcaccatgaaaaaattcgcaagtttcttattaggtgccgttgcaggatgtgcagcaggttttctcgcaggttcacttcttgttagtgatgaacaagttgatgacgttaagaacaagattaaagataatgacaagcttcaagatttgaagaagaaatacgataatggtactgaaatcgttaagaatcaattagcatcattccctaagaatgttgaagatgattcagaattgaaggattttgacgacatcgtaatcgatgactcaaataaagatgacgatgacagtgaaaatgctgaagagtcagttaacgatttgaacaatgctgaaaaagatgatactgatgcagcatctacttcagaaaaaccacaagcttaattaaagtcaaaaagaaaaggagctggtcgtgatgatcaatgtcattaagttaagacattgacaaattatcgacttggacttttaagatcattcatttgcgatttatcgcatttgaatgctcttttttcatgccaaataaacccaaatcttgtttagaaattaggctacacgatataaataatatacagctgatttgggtttgagatttcttttgtcttttcgtcctggtctgatcggaattgtgtaatgactaatttgaataagaatctttttaaagatttcagttgaagaagaaattatatacatagcctggatgacaaaacatgactgtttgaaattgatcgcatattgatacttgcattttttttgtggtacatatgcttgagcatcaatttgactgactgcgttaaacataatcatgtgggcatagatctccatttcaataaatctatcctgcttggaatgaaactgtacgctacctaaagcatatttcaactttttgaatgaagtttcaatgccccagcgcaaatggtagatttctttgatcctttttaagggataatcggctctatttagattagttagaacaacttcccattcttctttgcctgatttaggatcattaattctaaatttacaggcacgaaattttattgtacataactctccaaagtcccagctgccatctttggtatttttagaccgatattttatatattgacggtaatgatggttaaccaaatgaacgttttctgtagccttatgggtttcataataataattagaggtagtcacccagcaagctatatccttatcacactcttgattaggcaactcagctacttccttaaatgcgccatatcccgttttagtacgtatgacataataacagttaggcaggcgattacaattttcaatcatgttaaagccggtataacctcgatccatagtaactatatatggtccgcaatttagctttttaagcatttgaacggcggctttacgttcatccatctttgacttaggctgaaagatgcagtcttgataagtattatttaacaggtcatagagtgcattaacatgaatttggcaatatggctttcctttatgattgagatttccaacgatattctctgatttaggattccagatttgattaaaatcagacccatcaatggcaaatatacgatatttatgatcaaataactggatattaaataaattctgattaaatacagttagaatatgcttaaaacatgcgggtgaaagctgacctttgcgttggacataagcggaagtactgactactttatcgttatttttaatagctttttggccaaaagctctaaacaactcactggtcaaatcttttccttgcatattaatagtagttttaatgactgtagctgcatctaaaaaccgcttcctagtgaaggcatgaggatcatcgataaaatcatgaatatgctttccagtatcattgataatttgatcaagacgatctaaaatatttctgtgaagggctttcataattaacaccagctttctggcaataattttgaaggtttaataatttaatcagagggcgaaaaggtaggttcttttcgcctttattttatgcaaaaaaagaaccaaatcataatgattcggttctacagagattagattcaatttgtcaatgtcttaacttaatgacattgtcgtgatgatcagctccttttttatgactaaaattagtctttaagtggtaaaacttttaagtctttgtcagtgtgagtaaaggtttcaaagccgtccttagtaacgacaccacaatcttcaattctgacaccagcaaagccagggatgtagatacctggttcaatggagaagcacattccttcttcaagaactaagtcgttaccttgtacgattgatggatattcatgaacgtttttaccaatgccgtgacctaggcggtgaatgaagtattcaccatagccagccttagtaatgatgtcacgagccacgctatctaattcttcagcggtgattcctggcttagcagcttcgattgcggcttgttgagcttcacgatcaacttcataaatttcgcgttgcttagcagtaggttcaccgtaagcaacagttcgactagaatctgatgcgtaaccatcgtgcatggtacctaagtcgaataaaactaattcatttggttgaacagtgttcatagttggaccaaggtgaggattagcggcgtttttaccagcttgtacgatggtttcaaaactttcatgcataacacctttttgaatttttagttggtaatcaatttgaccagcgatgcttctttcggtgacgccagttctaattgcgtcaaagccaatcttaaaagcgaagtctgcttctgcaccagcgccttgcaacttcttgatttcttcaggtgtcttgtaaagacgaattttttcaataaaaggtgaaacatcattagtaaaactagcgttaggaaattcaccacgtaagagttggtagtgggcaacagacaaatcatctttttcaattgcccaattatgggtatcgtgagttctctttttgacattagttgcgatgatgctccaaggattctcggaatcaagatagccgataacatcgccatcccatgcagatgcttttgcttcttctacgtttaaagctgggcagaaaataaatggttccgcatcttttaaaacaattaaagcaaagattctctcatgtggttccattgagtaaccagtaaagtaggaaatggtgattggattagaaatgtaagcaagatcattattggagtcttgcaaccattgttgtaatttatctaagttcatattgtcctcttttcttgcaaattatgtttactgtagtatatcatgatctcttaatgaaaaaatgaaagaaaagctgtaaacgtttgcattttatgcagcatcgtgatatctttaagtgaaggattttttggaaggactgagagataagagatgcataaacaagaagttacaatctatgacgtcgctcgggaagctaaggtttcaatggctacggtttctcgtgttgtgaatggtaatagtaatgttagaaaagagacacgtgaccgtgttctcgaagttattaaaagactgcactatcaaccaaacgctgtagctcaaggtttagcttctaagcggactactacagtagggttaattgtcccagatttaactaatttatactttgcagaattatctaagggtattgatgatattgcacttttatataaatacaacatcattattactagtattgaaaaccgcttgatgaaggaagaccaagttattcaaagtttgctgaataagcaagttgacggtgtaatttatatgtctaaccgtttatcagatgcagcagctgatgcctttaagcggactgatactcctgtggttttagcaggtactaaagacaatcgtgatgattttgcttctgtcacaattgactataagaaggctgatactgaagcattaaatttgatgtaccatgatggtaagaagcatttgggaatcgtagttggtgatcaagatgctgtagttaacagcgaaaacagaatccctgcttatgaagaattcatggaagaaaatgatttgggcactcctcgaatctatactgatattaaagactattcagatggttataatttatacccacaattagttaaagatggcgttgatggtgtaattgttactcgcgatatttcatcagttggtattttgaattctgcgatggatgcaggtaagaaagtgccagaagatttggaaatcgtgaccgccagtgctacgcagttagcttctgttgttcgtccagctttgactacgattaagcagccactttatgatatgggtgccgtagcaatgagaatgttgactaagttgatgaacaatgaagaagtagatgatactcatattgttttgccatatgaattagttaaaaagcaaagtactttaaatcaataattaagtgaagcaaaaaagaccagtttactggtctttttgttttagtagataattttgttaatctgttgaagcttttgtgtaaaagtggttggtgcaattgcttgattaggattatagggcaaaagcacgagattagtgtactgactgacccgtggtaaggactgataatctctgaaatcgtcttgactaaagaagccatagaacaagatatcttttgccttaacccaacctagtttggtataaatccacatgtttttaggactaccattaaaattttgaatttttaataattgatttgcgggtaatttttgctgcgttttggcttggttatcaggataacgataaattgtaactttttggttaggtttagcgataattttcttattttgataaggagcaatatctcgctttgttaagtcaaaattaacgaattctgccgaaataaaagttttttcagcaatttgataaaataagcgatcatctacacggacgccataagtgacattgactttttgacctggttgcacgtacttcttttctttgatgcgaacatacggattcatcattgtagcggctttagttttaccaaaataaattccagttctattaatagcgtactttttagtgccacttttggctaatttatatttaaaaccagtagcgggatagttggtaaccacgccatcaacattccgattaattagccaatgccatagggcaggcgattcgtccatttcggcccagacaaacagttgcttatgtaatttgtgaagccagtgaattaaaaagggatgctcttgcacaatgtcagaagaagcattgatagcattaacttgaggtaaattactgaaattaatgcgtttcaggctaccaacgatcaaaattagataagcttcaggcataatttttctaaagtgaaagagactagcagcggaaaatgaatgaatcatgattcttttctgcatatggtattttttaactatttgtgcgattttatcctctaactcataggacggatttaatccatgatcaattttagtctctaagacaaatttagtgtttggtttattttgataatgcttaaaaagctcactgagtgacataacgtgttcgccattgtcatattgcagttgtttaagtgctgtaaaattattttgtgatacaattgcatgtgtatgagtaactcggaagaggtcatcatcatgtgcaatgaccggaactccatcctttgagagctggagatcgagttcaacgtaatcagcaccagaattaaaggcggaatcgtcagcctgaattgtttcttcaggatatttgatgggatcaccacggtgccctacaactgtaaaaccactatttatgaaaaagactaagctaaaaaaaagaacccaaacgagtcggcttttaaatttcatgtgtacacctctatcgcatacttaacaatagcatggttacacatttttttctatttatagtactattcttttatcagtaatcggtatgattgaaatctaaaggatgagatttaatggaacaattggacttaattgaagaagttaccagaaatgatggcagtcgatattatgaaatctctaatattgaccaaaatggaattgcagaattagctgcagatcatggcttaattaaaaaagtcaaaatactgcagctgaatattcctcgaactaaggcactgattgcttatgaaaaatatatcaatgatacttatgacttgcagactttgactaatgaaagtgattggaaaaatccaaaatgggtagaatgggataaacctaagggaaaaattttagacgcatataatatgatcttaaaagccaatcgaattggttagaaagtggcataaaaaatggaacaactgcgaattttacataccaatgatcttcattcacattttgaacatttccctaaaatcggacgttacttgaaaaaagcgcaggctgatcaatcggttgatggtatctacacttttgatgcaggagactttatggatcggtctcatcctttaactgatgctacggaaggtcaagccaacatcaaattgatgaatgggtttaactatgatgcaattacgattggcaataatgagggaatttctaatccacattgggtattggaacatttatttgatcatgcggactttccgacagttttagcaaatttgcgtgaagaagatgaatcaatgcctaaatgggcagtcggccatatgtttttaactactaagaaaaagacgcgaattgctttaattggcctgactgcagcttatccaatgacttatggtcctaatcattggcatgtcaagatgttaggtgacagtatggatcacgaattagctcaaattgaaggaaagtatgatgtcttaattttattgactcatgttggattaaaaatggatcgctggttagctaaacattatcctcaaattaatttaattgtaggaggccacagccatgatctgattgaacatggtgaaaaagtggggcatacttggattacgcaaacaggtaaatggggaaactatgtgggtgatattcatctagaacttgaagatcatcacgtgattaaggtagtacctcgcactatttctactgtttcgatgccagaagaaccggaagataaggcagtgattcagggctactatgatgaaggtaagcgacttttatcagaacgaaaagtggctaatttacctgaaaaatttgcggatgataaagtagcagccgttcaagtttctcttgatgcgattgctgattttgctaaaacagatttagccattttaagctcaggcctattcttgcccccgtttaagagtggaataattactcaatatgatttacaaaatgccttaccgcatccaatgcacgttgttcgttcaaccttgaaaggttatgatttgtggcgactagtgatggaaattgaaaagaatcggcattacctagaccattttccactgcaagggatgagttttcgaggaaaaatttttggtcagatgtattacaaagggatcaaggttgatatgcgtagacgtgtagtttacgtcaatgggcatgaaattgatccacaaaaagaatataaaattgcctgtttggatcattatgtcttagttccattttttccaactttggctattgtcggtgaaaatgagtttttattcccacaatttttacgtgaagttgttggtaaatatttggctgaaaaatatcctttaacagcgagaagtgaaaaagatgactgaagaaaataaatttgaacaagaacagccaattagacacccacttgctgacgtggtgcaagatggtaagagcattaagattggtgcgcagctttatagcatcattgtcaatgagcgagacgcacttgatttagaatctttgcgtaaaaaatatgatccttatcttgaccagtatgattatctggtgggggacgtttctagtgaacatttacgcttgaaaggcttttataaagacggtgctagaaccgcaattgataaaaaagaaatggcgatcgtggattatttaacggaatattgtaatcccggcggaccttattttatcttggaattaacgcatccagtacattattatcagcatcaacgtactaaaatacggcgatcacgtgaacgacgcgagcgcgattttggtaaaaatgagcgttatcatgcacgacgtcgaaattatcggaagaataaaaatgaaaataatccgtttaagaagcggcgtgttcatcaaactaaatttaagaaaaaaacaatcaattgcagtgaaaaaagaatttggacggcatcattcatttattattaaaaagagaaagggaaactagtgaaagattaccgggtatttttaattgacttagacggaactgtttatcgtggtaaggaaacagttgaatcaggagtaagatttgttcatcgtttggttcaagcagggaaagactatttgtttttaaccaacaatacgaccagaacaccgcaaatggtagttgataaactaaagggacacggtatcgaaactgatacggaccatgtttatacgccaagtatggccacagctagctatattttacaaagagaacacaaggaaaagatcggcttgtatattattgggcagattggtctctggcatgaattattgcaacatccagagtttgagcttaatgaagaaaatcccgattatgtaattgtcggtatggatacagatctgacttatcataaagtacgagtagcttcacgggcgattagacgtggagccacttttattgggactaatgccgatatgaatttaccagcagaggatgagctaattccaggcaatggttcacaatgtgcattcgttgctgcagcaagtggagtagagccactgtatattggtaagcctgaatcaattattgtaaaaatggctttggataaagttggctatagcaaagatgaggcacttttggtaggtgataattacgataccgatattaaagctggctttaatagtggagtagatcagttgttgactttgacaggtgtgacgaccaaagtggatattgcagataaacgtcaaccaacaattttagttaataacctagatgaatttgaattatgattactaaaaacaatattttttcgctgatttatcattttttgtttgctgtttctagcagtgtaattggggcaattgtggctagttggccattattgtttatttttatgatcgtacaaaagacatatgagacggttcacatgtctttgtttaaggtaatgcataattataaccagctgatgttttatttgctctggccctttaaaaagcagcttaaaatggataatttccctacatctgctaatgcggcagaacattttgcggaatgtaagcatttatttattctgactctattagtttttattatctgcatcatagtgcactttgtttttaaacgacaaaagaaaaagctactgcttaatttggataaatcagtagcccttattttgctattattgccaattattatttttccatttgcagtaaccaatttcgacagtttctttgtgatttttcaccatattttgtttaacaatagtgattggctgtttgatcctaatactgacccaattatcaatgtgctaacggaaggcttctttgcttcttgttttgccgttgctggggttatttatgaattatattttgctgaaaaattattacgtaagtaaaaaagagttccttagtggaactcttttttgagtgatatttttttcttgattgcgacaattgcgattggcacaactgatactaaaatgatagcaattacgatcattgaaaaatggtcctttacaaatggaatattgccaaagaagaaaccgatgattgtgaacaatcctgtccaaagcaagccacccaagatgttgtaggtgataaatttaccataatgcatcttactgccgccggaaatgaatgggacaaaagtacgaataaatggtataaatctacctataacgatcgtaattggtccgtggcgctcaaagaacttttcagcggccaaccgattattttgattaattaatttattgaaccagctatgtttttcaccagctctggttgaccaggcaccaatttcatagttgatactgtcaccgattatggcggcgaatgctactataagataaactagccaaatatttaagccatacttaggattagcagccattgcactcgcagcaaaaatcaacgaatcgcctggaagaaatggaaaaacgactaagcctgtttcaataaaaatgatagcgaataagattaaataggaccaaccaccgaattggttaacaatcgggattaaatggtcatcaatgtgcaaaataaaatcgattaaactcatctggaactcctaaaaactagttgaatgaattgtcaaagttttttcagggaaaagatcacgcataatcgcggtgattgcaatctgggcttcgccaaaaccgagagcgattaaagggacgcgtccaagataggtaacaacatcgccagctgcataaacaccggcgatattagtttgcattgttgaattcaccttaatttgtgcgccagctaaatcgattccccattttttgacaaagcgattattagctttaaagccatatgcaacgactgcttggtctaacttgatattagttaagctatcttttcccatttcttttaaattaacgttcagttgattatcaaccaaattgatttgtttaggaagataaggagttaaaatttcaacattttttaaagacttaagttttttgacattagattcaagaccgcgaaattgattacggcgatgaatgattttgacattggcataattagctaattctagtgccaggtctaatgctgaatcgccgccaccaaagacgccaactgtttgtccgacaaattttgggggatctttaataaagtaatgaatccttttttgagtatcatcatccatagataatggtaaagctttaggtttaaaggcaccggcaccagtggtaatcaatatgctgcgggatgcaactatatcatcgataataaagccgtctttttgtttagtgacattttcaactttatggttagtaaaaatagttgtatccgttaaattatgtcgtaaattgtcgattagttcagttcctgtaatagagtcgtaagcaggaatatctttgattttcttaaaaggataaagcatttgtggctgtccgcctgtttcagataatgaatcaaacagtacggtcttgagtccatgaagatgggcaaatcgcgcggcaaataggccaacaggtccgccaccgataatagttaaatcaaattttttaattttaatgacctcctcaaagtagtgatgtatcaactttaacatgaattttgtaaatattcatttaaaaataagcttgtcaaaaaatgaattttaaggtatattattgaagtcgcctttttaagagcgagcataattctttattgaaaaaatacttgcaattaatattcaagtattatacattaataaagtcgcttcgagagatgcgacgagagcttaaaaacagacatgcaaggaaagaaaacaaataaaaagaaaaaagtacttgcaaagaagtaaataagctggtaatatatttaaatgtcgtcaggtgaaagcagaaaaagcttgagcaagacaaaaaaacaaatcaaaaaagttcttgacaaagaaatgatggtttgataaaatatgaaagctgtatgctttgcaaaaaaagcaagacagaggtagtactttgaaaactgaacaaagtttcgctaaaagtgtgcgggtgtaaaaacccaaacaagaagcgaagtcaattcgcaagcaataaatttgagacaaagatcttaaataaggaatgagcaatcattcaaactttttaaaatgagagtttgatcctggctcaggacgaacgctggcggcgtgcctaatacatgcaagtcgagcgagcgaaactaacagatttacttcggtaatgacgttaggaaagcgagcggcggatgggtgagtaacacgtggggaacctgccccatagtctgggataccacttggaaacaggtgctaataccggataagaaagcagatcgcatgatcagcttttaaaaggcggcgtaagctgtcgctatgggatggccccgcggtgcattagctagttggtaaggtaaaggcttaccaaggcgatgatgcatagccgagttgagagactgatcggccacattgggactgagacacggcccaaactcctacgggaggcagcagtagggaatcttccacaatggacgcaagtctgatggagcaacgccgcgtgagtgaagaaggttttcggatcgtaaagctctgttgttggtgaagaaggatagaggtagtaactggcctttatttgacggtaatcaaccagaaagtcacggctaactacgtgccagcagccgcggtaatacgtaggtggcaagcgttgtccggatttattgggcgtaaagcgagcgcaggcggaagaataagtctgatgtgaaagccctcggcttaaccgaggaactgcatcggaaactgtttttcttgagtgcagaagaggagagtggaactccatgtgtagcggtggaatgcgtagatatatggaagaacaccagtggcgaaggcggctctctggtctgcaactgacgctgaggctcgaaagcatgggtagcgaacaggattagataccctggtagtccatgccgtaaacgatgagtgctaagtgttgggaggtttccgcctctcagtgctgcagctaacgcattaagcactccgcctggggagtacgaccgcaaggttgaaactcaaaggaattgacgggggcccgcacaagcggtggagcatgtggtttaattcgaagcaacgcgaagaaccttaccaggtcttgacatctagtgccatttgtagagatacaaagttcccttcggggacgctaagacaggtggtgcatggctgtcgtcagctcgtgtcgtgagatgttgggttaagtcccgcaacgagcgcaacccttgttattagttgccagcattaagttgggcactctaatgagactgccggtgacaaaccggaggaaggtggggatgacgtcaagtcatcatgccccttatgacctgggctacacacgtgctacaatgggcagtacaacgagaagcgagcctgcgaaggcaagcgaatctctgaaagctgttctcagttcggactgcagtctgcaactcgactgcacgaagctggaatcgctagtaatcgcggatcagcacgccgcggtgaatacgttcccgggccttgtacacaccgcccgtcacaccatgggagtctgcaatgcccaaagccggtggcctaaccttcgggaaggagccgtctaaggcagggcagatgactggggtgaagtcgtaacaaggtagccgtaggagaacctgcggctggatcacctcctttctaaggaagcgaaggatatggagagcaggaatgctaagagaagtatccagagcaagcggaagcacactgagaaactttgtttagttttgagggtagtacctcaaagatttgaaaaacgccaagcgttagtcgggcctatagctcagctggtttagagcgcacgcctgataagcgtgaggtcgatggttcaagtccatttaggcccattgacataacgaagaaaaagagttaaagttatgtctggccgaaaataaaatactctgggggcttagctcagttgggagagcacctgctttgcacgcaggaggtcatcggttcgaacccgttagcctccattgatccagaaaaaggatcaaagagctagtacattgaaaactaaatataatccaagcaaaaaaccgagacaatcaaagagaacagattgtagagcgaccgagaagagaattcttgagtaaggtcaagtagaaaagggcgcacggtgaatgcctaggcactaacagccgaagaaggacgtgacgaactacgaaaagcttcggggagcggtaagtacgcagtgatccggagatatccgaatgggggaacccaatgcagagatgcattattgattagtgaatagatagctaatcaaaggaagacgcagtgaactgaaacatctaagtagctgcaggaagagaaagaaagatcgatttccttagtagcggcgagcgaagaggaaagagcccaaaccaagtgatttatcatttggggttgtaggactgcgacgtggcagtgtaagagatagttgaattatctgggaaggtaagccagagagggtgagagccccgtaagcgaaatctcaagcacgcctagcagaatcctgagtaggccgggacacgaggaatcccggttgaaaccgcgaggaccatctcgcaaggctaaatactagttagtgaccgatagtgaaccagtaccgtgagggaaaggtgaaaagaaccccggaaggggagtgaaaaagaacctgaaaccgtgtgtctacaagtagtcaaagcacattaaagtgcaatggcgtgccttttgtagaatgaaccggcgagttacgttatctagcgaggttaagtcagaaaagacggagccggagcgaaagcgagtcttaatagggcgaaaagttaggtgacgtagacccgaaaccaagtgacctacccatgaccaggctgaaggtgtggtaaaacgcactggagggccgaacccacgtaagttaaaaattgcggggatgagttgtgggtagcggtgaaattccaaacgaacttggagatagctggttctctccgaaatagctttagggctagcctcgtggagaggataatggaggtagagctctgtttggactaggggcccgtcaggggttactgaatccagataaactacgaattccagatatccatacacgggagtcagactgcgagtgataagatccgtagtcgaaagggaaacagcccagatcaccagttaaggtccccaaatctatgctaagtggaaaaggatgtggagttgcgtagacaactaggacgttggctcagaagcagccatcattcaaagagtgcgtaatagctcactagtcgagtggcgctgcgccgaaaatttaccggggctaagcatagtaccgaaactgtggatgtgttttaaagagcacgtggtaggagagcgttctaagagcggagaagttgaatcgagaggatcaatggagcgcttagaagtgagaatgccggtatgagtagcgaaagataggtgagaatcctatccgccgaaagactaaggtttcctggggcaggctcgtccgcccagggtaagtcgggacctaaggcaaggccgagaggcgtagtcgatggataacaggtagagattcctgtactgtgtcaaatcgttaagagcgaaggagggacgcaggaggtgaagcacgcatcgcgatggaacgatgttcaagcaacaagtgcggttaagagtcaaatgcttctaaccagcaacacgagttgtgaagaggagtgaattaaaagtagcgaaggtgtggtaatcacactgccaagaaaagcttctagccagagatgacatacccgtaccgcaaaccgacacaggtagtcgagtggagaacactaaggtgagcgagagaactctcgttaaggaactcggcaaaatgaccccgtaacttcggaagaaggggtgctagccaagagattggttagccgcagtgaataggcccaaacaactgtttatcaaaaacacaggtctctgcaaaatcgtaagatgacgtatagaggctgacacctgcccggtgctggaaggttaagaggagagcttagcgtaagcgaaggtttgaattgaagccccagtaaacggcggccgtaactataacggtcctaaggtagcgaaattccttgtcgggtaagttccgacctgcacgaaaggtgtaatgatttgggcactgtctcaacgagagactcggtgaaattataatacccgtgaagatgcgggttacccgcgacaggacggaaagaccccatggagcttcactgtagcttgatattgagtatcttttaaacatgtacaggataggtaggagccagagaagataggacgctagtcttattggaggcaatgttgggatactacccttgtttgaaggatgctctaacctcgacctgtaagccaggccagggacagtgtcaggtgggcagtttgactggggcggtcgcctcctaaagtgtaacggaggcgctcaaaggttccctcagaatggttggaaatcattcgcagagtgtaaaggtataagggagcttgactgcgagagagacaactcgagcaggtaggaaactaggacttagtgatctggtggtaccgtatggaagggccatcactcaacggataaaagctaccctggggataacaggcttatctcccccaagagttcacatcgacggggaggtttggcacctcgatgtcggctcgtcgcatcctggggctgaagtcggtcccaagggttgggctgttcgcccattaaagcggcacgcgagctgggttcagaacgtcgtgagacagttcggtccctatccgtcgtgggcgtaggaaatttgagaggagctgtccttagtacgagaggaccgggatggacgcaccgctggtgtaccagttgttccgccaggagcatcgctgggtagctatgtgcggaagggataagcgctgaaagcatctaagtgcgaagcccccctcaagatgagatttcctttgcgtaagcagtaagacacctcagagacgatgaggtagataggctgggagtggaagtcctgtgaaggatggagcggaccagtactaatcagtcgaggacttgaccaaagcgaagcaaactggaaggttttttgcgagaaggattatgtttagttttgagtgtaaaagctcaaaagagtacggtggcgaaagcaagaaggatacacctgttcccatgccgaacacagaagttaagcttcttaacgccgaaagtagttggtgggcaactgcctgcgaggaaaggaagctgccgtgctcaatatggaggattagctcagctgggagagcatctgccttacaagcaggaggtcacaggttcgagccctgtatcctccatatcgagtcgttagctcagttggtagagcaacggacttttaatccgtgggtcgagggttcaagtccctcacggctcatgaccctatatatgcgggtgtggcggaattggcagacgcgctagatttaggttctagtgttttcggacgtgtgggttcaagtcccaccacccgtattgccaaccacatattgacaatatgccgatttagctcagttggtagagcatctgtcttgtaaacagggggtcgtacgttcaagtcgtataatcggcatttatattacgcggaagtagttcagtggtagaacatcaccttgccatggtgggggtcgcgggttcgaatcccgtcttccgctttcatcaacacgccggagtggcggaattggtagacgcacgggacttaaaatcccgcggttggtttcaaccgtatcggttcgactccgatccccggcattgatgatgcgcccttagcgcaactggatagagtgtctgactacgaatcagaaggttgaaggttcaaatccttcagggcgcatataacgggaaatggctcagtttggtagagcacctggtttgggaccagggggtcgcaggttcgaatcctgttttcccgattgtaatctaatggtgattggttacattttggcggtgtagctcagctggctagagcgtccggttcatacccgggaggtcgagggttcgatcccccccgccgctataattgtaagcttggacctttagctcagttggttagagcagacggctcataaccgtcctgtcgtaggttcgagtcctacaaggtccataatatggcttttatattaatatcgcgggatggagcagtctggtagctcgtcgggctcataacccgaaggtcgttggttcaaatccagctcccgcaatttggtccattggagcagtggtttatctcgcctccctgtcacggaggagatcatgggttcaaatcccatatggaccgtaagatggctcggtagctcagtcggtagagcaaaggattgaagctccttgtgtcggcggttcgattccgtcccgcgccatttcattttatattaggtgcgggtatagtttagtggtaaaacgaaagccttccaagctttagtcgcgagtccgattctcgttacccgctttatatgggcctatagctcagctggtttagagcgcacgcctgataagcgtgaggtcgatggttcaagtccatttaggcccattggagacatactcaagtggctgaagaggcgcccctgctaagggtgtagatcgggttattccggtgcgagggttcgaatctctctgtctccgctatatagaaaagtaactgttctagattaatttctagagcagtttttttgtgtaccgagcggcattcttagtccgatgaaagtgttagaactaagagccagtagcaatgatattatgagtatgggacgtttacaaaggagtaaatacctgctgaaacagtaaggaattacaaatgtatcgtcttatatgcaaccatatgtatagtggatggaaggagatgagttcgttaagttctctctgcattgaaaacacgtcataagatgttaaaaccttaattttgagttattgataaacctaaatgcatattattttgaatgacttaatggaaattattacacttcttttaggtaaaagtcttggacattgattcaagtcaataatcgtgtatataacatagggagagccgattgttttaaatttcttcttgtatgatctatattaaaaaaataattttgtgggggatttcatagtgatataaagaagcagtttaatatggaacaatttataaagatcatttagttaaagataagagaagctgttttgcgaaactgtcaaatcttttgtgtaaatagttctttctcgtaaattgattttttaattatttatttaatcaaagtaggattctaaggtgtcctgaacctgaccaaagcctttatgaattcgattgaaataacggtcattgtagctcattgcctggatgccaataaatgcatcaagcgactgttcagttggaaattctgccttaggcttagctttacgcttgatgacgttgttaaaggattcaatcatattggttgaataaattgaagctctgatttgtttgggataattgtagaagactagcagatcgggctcaatttccttcaaacctttgatgacatggctataagctttattccatttggcatagaatttgtgcaagacagctgcagcttcttttttgcttgtctgttgatgtatctgcttgaattcgttcatgatcttttcacgatcgtcgacgcgtactttagcgcagatattgcgcatgacatgaaccaggcagcgttgaaaatgagctttaggataagtcctggccaaggctgttttcatgccaacaacaccatcagaaagaaaaagctcaacttgcttcaagcctctggacttcatgttttgaagcatctctgtccaaacttcaatgttctcactaggagcaatgcagtagtcaatgacttccttatgtccattaggtttaatgccaatggcaatatatactgcttcacgctcaaacgtttctcggcgcaaaggaaggtatgtcgcatccaaatagacacagaaaaacttgtcgcttagcttgcgcttgtgataagcctcaatcttggggagcatctgcttggaaatatttgatacctgagctggactgtaatggctgccatacatcttttcaattagatcggctatttccctggtggtcacgcccttggagtaaagcttgataatcatgctttccaagatatccgagtgctgcttgtagtcaggcagcgtgtgctgatgaaattgaccgttgcgatcccgaggcacttgcacttcaattgggccaaattgcgtatcaactttgcggaaataagcaccatttctagagttgccagtattccagccatttctggcatagggatcatagcccagaaaggcagtcaattcagcttctagcaagttattaacagcctgttgtagttctttgcgcaataaatcatttattttgtctggattgaatagagcttgagcaaaatctttggtaaaatcattcatgaaggagttcttctttctgtatgtgttttttttgttcaaaccaatcatacgagaaaggaactcctttttctaatgtttaaagaaataaatttaaggaatcattcatccttacacaaactattttacagtctctgttttgctctagctaatttgaagtattaagatagatataaatgttttacaacaaaaaaataaaaaagtacttgcattttgactgaatatctattaatattaaatacgttgtgattgagagatcacaatagtaatagctaattaaaaaaataaataaaaagttcttgacttttgaaatgtgattagttattataataaagtgctcttgagtgagttacatgacccgttggtcaagtggttaagacacggccctttcacggccgtaacatgggttcaaatcccgtacgggtcattgccacaatttatttttttggcattaagcaatggaggattacccaagtggcttaaggggacggttttgaaaaccgctaggcggttctgccgcgcgtgggttcaaatcccacatcctccttagttgaatatcgcgggatggagcagtctggtagctcgtcgggctcataacccgaaggtcgttggttcaaatccagctcccgcaatttggtccattggagcagtggtttatctcgcctccctgtcacggaggagatcatgggttcaaatcccatatggaccgtaagatggctcggtagctcagttggtagagcaaaggattgaagctccttgtgtcggcggttcgattccgtcccgcgccatcatctggaggagtagcgaagtggctaaacgcggcggtctgtaaaaccgctctctctgagttcggcggttcgaatccaccctcctccataatagggatatcgtataaaggtagtacatcggtctccaaaaccgctagtgtgggttcaattcctactatccctgtttaccttcatggcggaattggtgaaggggttaacacactggtttgtggatccagcatgcgtgggttcgattcccacattccgccctagtattgggatatagccaagtggtaaggcattagactttgactctaacatgcgctggttcgaatccagctatcccaattctaaataatttcataacttatggcggtgtagccaagtggtaaggcagaggtctgcaaaaccttaatcgtcggttcaaatccgacctccgccttatcaaccgaataagttgattattttaaaatttaatattatggcggtgtggcggaattggcagacgcgtcagactcaaaatctggtgtccattacggacgtatcggttcgaccccgatcaccgctattattatgaagcgatccaattattggatcgctttttttttattttaaaatgttagcattttattatataaattgcacatgaatacaggaatctttataatgctacatatggaggtactcaaatgaatattggtctttataccgatacatattttccccagataagtggcgtagctacttcaattaaaacgttaaaagaagcgttggaaaagcaggggcataatgtatttatttttactactactgatccgaacgtgaaaaaaggaactgtagaaccgaatgtatttcgttttagcagtattccttttgtctcatttaccgatcggcgaatagcatttagaggactatttgaagcaaccaaagtagctaaagaagtcaatcttgatatagttcatactcaaactgaatttgcattaggtactattggcaaatatgtagctcatcaattagatattcctgctatccacacttaccatacgatgtatgaagattacttgcactatattttaaatgggcatttgcttcgtccatatcatgttagacaatttgttaaaagctatttgaaaaatatggatggatgtattgctcctagtggccgagttgaagaattattacggcgctatggcgttcaaataccaattagggtgattcctactggagtagatttgcagggcatgaacaacgatattcaacgtgatgtgcggcaagaacttggaattgatcaagatgcgcctgtaattttaaccttaagtagaattgcagccgaaaaaaagattaatcatattttgaacgtaatgcctgaaattattgatgaatttcctaatgtgaaatttgttatcgcaggtgatggccctgatgttgatgtgttaaaggatcaggtagagcgattaacactagagaattacgttatttttgtcggtaatgtagagcatggcgatgttggtaattattatcgaatggctgatctttttgtttcagctagtgatacagaaacacaggggttgacttatattgaggctctagctgcaggtacgccatgtgtggtttatgacacagactataccgaaaacatttttgatcaagatatttttgggcagacatttactacacaacaagaaatgttagaagagattattactttgcttaagcaagggacgaaaagaatcccgcaggaacttttgcaaaataaattacagaagatttcagctgatcaatttgctaaaaatgtgtctgatttttatcagtatgcaattgatcactatcaacctaagcatgatgaggagactaaaaagaggaactaaatgattagaattaatatgttctcgcaagctgattctgttaaaggacagggtgtaggttcagcttataatgaattgattaaacttctgaggacgcacttagtagacgaattttatgtaacgattaacaaatatggcaatagcgatttaacgcattatcacacgattaatccaacctattacgcaaatagttttttaccagcacgtggcaggaagattggctatgttcactttttaccagatacattagaaggctcaattaagttgccaggcgtagctaaaaaagttttttatcaatatgtaattgatttttataaacgcatggatcaaattgttgtagttaatccaatctttattgataagttggttaactatggaattgatcggaacaaggttagatatattcctaattttgtttcaaaaacagaattttatgaagaatcattggccagcaaaaacgcatttcgtcatgaattaggaattccacttgataaatttgttgtttttggtgatggtcaagtacaggaacgcaaggggatcgatgactttgttaagatggcacaagctaatcctgatattcaatttatctgggcaggcggtttttcgtttggcaaaattactgatggctatgatcattacaaagaaatggttgacaatccacctaagaatatgacgtttgcgggaattgtagagcgagagaagttagttaagtatttaaatattgcagacttatttgttcttccatcatatgatgaattgttcccaatgtcagttttggaagcattcagttgtggaacaccagtattattgcgtgaccttgatctttataaggcaattatcgatggctattatctaagcggaaaagattttggcgaaatgaatcaagtattgcaaaaagtagttgccaatccacaaactttgcagaaatacagcgaattatcgcgtaaggcaagtcaacagtattcagaagatcatttagctaaaatttgggacgaattttatcatgagcaatatgaattaggaaaagagctaggtcaaatacattaatgaataaaaaacatttgtggggcattctggttgttttagcaatcagtgcctttgtgctatatgcagatttaaaagctacaccgatatcggaaatattacgggcagctcatggcctgaatatttttggattaatcatggtttttgctttaatgcttttgtcctatgtatgtgaagccggtatcttagctactttagctcatcgaaagaaagagcctaaaaggtcagcttggtcgtttttgcgaattccaattattcaagctctatttaatgcaattacaccaatgtccacgggtggacaaccatcacagctagccgcaatgattcaaatgggcatggaaggtggccgttccacctcaattttgctgatgaaatttattatttatcagatcgttgttttgtttgcctatgtatttacaattatttttggctttcatatggtaatgactaagttcgctggtttagcaatttttattgcaattggctttttgattcatgttagttcaattatctttttgcttgcaattatgtttgcttatcgttttactaaaaaggcaactaattggttaatggacttgttggcaaaaatgatgaaaaaggaacgagttgagaagtggcgtaaggctactttagaaaagattgatactttttatgcagagagtcagaaactaaaaaaagaaaagaagaaattatttgttgcctcgcttttaacagtattgcagctacttttcttttactccgttccatttatggtattaacagcgctaaatgtaccttgttcttggtatcaagttacgcaaatgaatataatgattatcatgtttatggcgatcattcctattccaggtgcgtcaggaggggcagaatatagtttccaaacgttattctccaccttcatttcttcacatggtgcgttaattttggctatgtttatttggcgcttttcaacatattttttcggtatgcttctcggcatcttaggctggatttttaagccgaaaaagataaaaagcacaaaaatgattaatttttattaaaacaacggtgtcttactaaatttcgtagtaagataaattaccgtaatgagaggagcagaagcgcgtggaacacactaaatctttttttaggtggctgacacagactaagttaggcttttttacgattgttttagtcttgttttggcttaaaacttattttatctatttaactaagtttaatttaggagcagttggtccaatgcagcaatttttattgctgattaatccgattccttcagggatgcttttgctgggaattgggctattttttaaaggacgtaaatcctattggattattttagttatcgattttttgctaacactgtggttatttgccaatattttatattatcgcgaattttcaaactttttgtcattttcaattattaagacatcaggctcgacttccgataatttgggtaaaagtattgcaggaattacactagctagcgattttttagcttttgctgatattgctgtaattatcgtgttattggcgaccaaagtaattaagatggatgttcgtccactgaagctaaaagttaatttgttaattgaggctttggctgtcagcttaatgggactgaatttattgatggcccaaaatgatcgttctggacttttgacgagaacttttgataataattacatcgtcaaatatctgggaatcaatgaatacgctatttatgatggctataagacagcacaaactagtgcacagatggccaaagctaatgtttctgatttgaagtctgttagaaactatttaaaagaaaattacgttaaacctaatcccgcttacaccggcgtggctaaaggaaaaaatgtgttaatcatccatttggaaagttttcaacaatttctgattggctacaaatggaaaggtaaagaggtaacgccaaatctgaataagatttatcatcaaaaagagaccattagttttgataatttctttaatcaagtaggacaaggcaagacttctgatgccgaaatgatgcttgaaaattctttatacggactacaatcaggtagtgcaatgtctacgtatggtacttctaatacttttgaaagtgctccagccattttgcatcaacaagctggttatactactgctgtaatgcatggtggtgctggctccttctggaatagaaataatgcttataagtcatttggctaccaatactttatgccactgtctttctatcagaacaaaccaagctactatatcggatatggcttaaaagataaaattttctttgatcagtcaatcaagtacattgagcgtttaccacaaccattttatttaaagatgattactgtaacgaaccactatccgtataatatcgataaaaagaatcagacgattgataaaacgaatactggggatgaaacagttgatggttatgtgcagaccgcgcattatttagaccaagcaattggtgaatttatgcgttggatgaagaagacgggcctagataagaagacactagtagtattttatggtgatcactatgggatttcaggtaatcaccataaggctagtgcagaattgcttaagaaagattcgtttaatgactttgataatttgcagttccagcgagttcctttgatgttccatatgaaaggactaaagggtggcattaatcacacctacggcggtgaaatcgatgttttaccaaccttactgaacttgctggggatcaaagacaaagatacgatccaatttggctatgacttgctaagcaaaaatgcaccgcaaattgtagcacaaagaaatggtgactttatcactccggaatattctaaggtgggtagcgattattatgacaccaagacgggcgaaaggatcaaacctaataagaaattaaaagaaaaattaactgcaatttctaacaccgtaactacacagctgtctttgtcagatcgtgtaattaatggcaatctgctccgattctataaaccaaaagggtttactagagtcaagccgaaggattacgactataacaaggcgccatctttaaaacgtttgtttgatgatccaagcaaaacttcactgtggtatcaaaatcatcgtaaaacgacgcaaaaagatttcaagacagatgcgcctgaactaaaaaaataactgcaaaaactagtaatttgtgataaacttggtaagtaaatcgtatgtgtgtattggaggcagcgcattgtataatttagttatgacgctactaatcattgtttcaatcttaattgtcattgcaacaatgatgcagccacaaaaacaacaagatgcattgaacgccttatctggcggtgccgtttttagtgggcaaaccaaaaaacgtggttttgaagcatttatggaaaaagtaacctcagttttattggtactctttttcgtctttgctattatcttagcttatatgtcttcaaaataaattttgtacctcccgatcaaaatatgatggggaggctttttttattaaatttaaagatcggagaataactgcatggcacaaaacgaaaaaattttggccggcgttttagaaatttttcgccataatccacaaaaacaatttcgtgtagatcaaattgaacgtgaagcacgtcgtgatagattaggtaattttactgaattaattaaggctctttcttttttagagcacgataaaaagattattacagatggcaaaggacaataccaattagctcaagaaaatactgaagttgaaggtgaatttagagctaatgataaaggctttggctttgttagattagatgatgaaaatgcggacgacgtctttgttgccgcagattataccaagtatgccgttaatggtgaccgagtaaaagtaaagatcactgctggtggtaatccttggaatggtaagggaccagaaggtcaagttgaagagatccttgaacatggtttggaaacgttagttggtgaatttcatccgctaactgatgaacaaagaaaaaacagtcattttatcggctatgctttgagtaacgataaaaagttgcataaataccgggtttatttgtctgaaaatggcttgatccctcaaatgggcgatatggttaaggtctcaattaaggattatccagatgaggaaaatcctgagtcaatgactggtgcagtagtcaacattattggtaataaaaatgaccctggcgttgacattatgtcaattgtggcagcacatgatgtaagaactgaatggcctgaagatgcaatggcgcaagctaatgctattcctgatcatgttactgaagaggaaaaaaagggtagagtagatattactgaccaacctgcagtcactatcgatggggatgattctaaggactttgacgatgctgtagttttatggaaaaagcctaacggcaattatcaccttggtgttcacattgcggacgtttctcactatgtgacagaaaatacgccgttgaacgaagaggcatttgctcgtggcaacagtacttacttagttgatcgggtaattccaatgctgccatttagactttctaatggaatttgttccttaaatgaaggcgtggaccggcttgttttgtcatgtgacatggaaattacgccagaaggtaaaagagtaggttataaaatttatccttctgttatgcgctcacatggtcgaatgacctacaacaaggttaacaaaactcttaagggcgaaatgaatggtttagaggataagtatgttaaactccgaccaatgcttgaagaaatggcagatttgcatgctgctttgtataaacaacgtcatcaacgtggtgctattgactttgaagaaccagaagcaaaaattattgttgatgatcaaggcaagccaacagatattgttttgcatgaacgtggtactgccgaaaagatgatcgaatcatttatgttaatggctaatgaaaccgtggccgaagatttcttcaaaaagcatgttccattcttgtaccgtgttcacgaaacaccagatgccgaaagaatcaagactttctttgaattttgtagcgcatttggcttgaatattcatgcggatccaaataacgttaagccaattgatttacaaaaagtagtttctaaaactacagatactccagaggaagctgtagtacaaatgatgatgctacgtagcttaaagcaagcgcattattcagaagaagcactgggacactttggcttagctgcagaatactatactcactttacttcaccaattagacgttattctgacttgatggtgcaccggatgatccatgcatatcaagaccaggggactaatgaagaagtgcaaaagcattttgctagttacttgccagatgttgcagaacaaacttcaacgcaagaaagacgttcaattgatactgaacgtgaagtaaatgacttgaagatgacagaatatatggccgatcaagtggggcaacactttgacgcggtagtatcttcggtaactagttttgggatgtttattcaattaccaaatacgattgagggattaatccatatttcgaatttgactgatgatttttacagttttaatgaaaaagcattgacgctaactggtcgaggtactcataagcaatataaggtagggatgccaattaaggtaaccttgattaatgctaacgttgaacaacatcagttagactttgaaatatatgatcctaatgcgcctaagcataagcataacgatcgcggaatgaataatcgtcgtcgtggaaaccgtggcttccgcaataatcatggacgccgtggtggtcagtttaataatcacagcgatcatggccgtggccgaggtaatggaaaccgtggaggtcggagaaattttaaacattagggattgatcttaatgaaaaaagaaaaagaagataatttaattgcacaaaataaaaaagcacgacacgactattttattaaggaaacattggaagcaggaattgctttaactggaaccgaaattaagtctgtacgagctagaagaatcaacttgcgggatggttatgtgcagatcgtcaacggacaagcctggctagaaaatgttcatattagtgaatataagcaaggcaatcggtacaatcatgagccactacgtagtcggcgccttcttttgcataaaaaagaaattgcacgtttggccaaagcacaatcagagcgtggtattgcaattattccacttaaagtgtatttaaaacatggctttgccaaggtattgattggtgttggccaaggtaaaaaggaatatgacaaacggcaaacaattaaagaaagagaccagaagcgcgatattcgacgcaagtatggtgtctaagatgagtctgagaagaatctcagactttttttgttgaaaaattttaaaaagtttttttattttcacaaagtaatgttcgaacaatttgaagaatgcagagaaaatcaagctaaatatttttttaattattatagaggcgaataatagtattaagatacgtttgatattgaaatattcatattaaaaatccgaacgaagagcaagacttgccaaagcggagaaaataaggtaaattaataaagtcgcttcgagagatgcgacgagagcttaaaaacagacatgcaaggaaagaaaacaaataaaaagaaaaaaagtacttgcaaagaagtaaataagctggtaatatatttaaatgtcgtcaggtgaaagcagaaaaagcttgagtaagacgaaaaaacaaatcaaaaaagttcttgacaaagaaatgatggtttgataaaatatgaaagctgtctgctttgcaaaaaagcaagacagaggtagtactttgaaaactgaacaaagtttcgctaaaagtgtgcgggtgtaaaaacccaaacaagaagcgaagtcaattcgcgagcaataaatttgagacaaagatcttaaataaggaatgagcaatcattcaaactttttaaaatgagagtttgatcctggctcaggacgaacgctggcggcgtgcctaatacatgcaagtcgagcgagcggaactaacagatttacttcggtaatgacgttaggaaagcgagcggcggatgggtgagtaacacgtggggaacctgccccatagtctgggataccacttggaaacaggtgctaataccggataagaaagcagatcgcatgatcagcttttaaaaggcggcgtaagctgtcgctatgggatggccccgcggtgcattagctagttggtaaggtaaaggcttaccaaggcgatgatgcatagccgagttgagagactgatcggccacattgggactgagacacggcccaaactcctacgggaggcagcagtagggaatcttccacaatggacgcaagtctgatggagcaacgccgcgtgagtgaagaaggttttcggatcgtaaagctctgttgttggtgaagaaggatagaggtagtaactggcctttatttgacggtaatcaaccagaaagtcacggctaactacgtgccagcagccgcggtaatacgtaggtggcaagcgttgtccggatttattgggcgtaaagcgagcgcaggcggaagaataagtctgatgtgaaagccctcggcttaaccgaggaactgcatcggaaactgtttttcttgagtgcagaagaggagagtggaactccatgtgtagcggtggaatgcgtagatatatggaagaacaccagtggcgaaggcggctctctggtctgcaactgacgctgaggctcgaaagcatgggtagcgaacaggattagataccctggtagtccatgccgtaaacgatgagtgctaagtgttgggaggtttccgcctctcagtgctgcagctaacgcattaagcactccgcctggggagtacgaccgcaaggttgaaactcaaaggaattgacgggggcccgcacaagcggtggagcatgtggtttaattcgaagcaacgcgaagaaccttaccaggtcttgacatctagtgccatttgtagagatacaaagttcccttcggggacgctaagacaggtggtgcatggctgtcgtcagctcgtgtcgtgagatgttgggttaagtcccgcaacgagcgcaacccttgttattagttgccagcattaagttgggcactctaatgagactgccggtgacaaaccggaggaaggtggggatgacgtcaagtcatcatgccccttatgacctgggctacacacgtgctacaatgggcagtacaacgagaagcgagcctgcgaaggcaagcgaatctctgaaagctgttctcagttcggactgcagtctgcaactcgactgcacgaagctggaatcgctagtaatcgcggatcagcacgccgcggtgaatacgttcccgggccttgtacacaccgcccgtcacaccatgggagtctgcaatgcccaaagccggtggcctaaccttcgggaaggagccgtctaaggcagggcagatgactggggtgaagtcgtaacaaggtagccgtaggagaacctgcggctggatcacctcctttctaaggaagcgaaggatatggagagcaggaatgctaagagaagtatccagagcaagcggaagcacactgagaaactttgtttagttttgagggtagtacctcaaaaagagctagtacattgaaaactgaatataatccaagcaaaaaaccgagacaatcaaagagaacagattgtagagcgaccgagaagagaattcttgagtaaggtcaagtagaaaagggcgcacggtgaatgcctaggcactaacagccgaagaaggacgtgacgaactacgaaaagcttcggggagcggtaagtacgcagtgatccggagatatccgaatgggggaacccaatgcagagatgcattattgattagtgaatagatagctaatcaaaggaagacgcagtgaactgaaacatctaagtagctgcaggaagagaaagaaagatcgatttccttagtagcggcgagcgaagaggaaagagcccaaaccaagtgatttatcatttggggttgtaggactgcgacgtggcagtgtaagagatagttgaattatctgggaaggtaagccagagagggtgagagccccgtaagcgaaatctcaagcacgcctagcagaatcctgagtaggccgggacacgaggaatcccggttgaaaccgcgaggaccatctcgcaaggctaaatactagttagtgaccgatagtgaaccagtaccgtgagggaaaggtgaaaagaaccccggaaggggagtgaaaaagaacctgaaaccgtgtgtctacaagtagtcaaagcacattaaagtgcaatggcgtgccttttgtagaatgaaccggcgagttacgttatctagcgaggttaagtcagaaaagacggagccggagcgaaagcgagtcttaatagggcgaaaagttaggtgacgtagacccgaaaccaagtgacctacccatgaccaggctgaaggtgtggtaaaacgcactggagggccgaacccacgtaagttaaaaattgcggggatgagttgtgggtagcggtgaaattccaaacgaacttggagatagctggttctctccgaaatagctttagggctagcctcgtggagaggataatggaggtagagctctgtttggactaggggcccgtcaggggttactgaatccagataaactacgaattccagatatccatacacgggagtcagactgcgagtgataagatccgtagtcgaaagggaaacagcccagatcaccagttaaggtccccaaatctatgctaagtggaaaaggatgtggagttgcgtagacaactaggacgttggctcagaagcagccatcattcaaagagtgcgtaatagctcactagtcgagtggcgctgcgccgaaaatttaccggggctaagcatagtaccgaaactgtggatgtgttttaaagagcacgtggtaggagagcgttctaagagcggagaagttgaatcgagaggatcaatggagcgcttagaagtgagaatgccggtatgagtagcgaaagataggtgagaatcctatccgccgaaagactaaggtttcctggggcaggctcgtccgcccagggtaagtcgggacctaaggcaaggccgagaggcgtagtcgatggataacaggtagagattcctgtactgtgtcaaatcgttaagagcgaaggagggacgcaggaggtgaagcacgcatcgcgatggaacgatgttcaagcaacaagtgcggttaagagtcaaatgcttctaaccagcaacacgagttgtgaagaggagtgaattaaaagtagcgaaggtgtggtaatcacactgccaagaaaagcttctagccagagatgacatacccgtaccgcaaaccgacacaggtagtcgagtggagaacactaaggtgagcgagagaactctcgttaaggaactcggcaaaatgaccccgtaacttcggaagaaggggtgctagccaagagattggttagccgcagtgaataggcccaaacaactgtttatcaaaaacacaggtctctgcaaaatcgtaagatgacgtatagaggctgacacctgcccggtgctggaaggttaagaggagagcttagcgtaagcgaaggtttgaattgaagccccagtaaacggcggccgtaactataacggtcctaaggtagcgaaattccttgtcgggtaagttccgacctgcacgaaaggtgtaatgatttgggcactgtctcaacgagagactcggtgaaattataatacccgtgaagatgcgggttacccgcgacaggacggaaagaccccatggagcttcactgtagcttgatattgagtatcttttaaacatgtacaggataggtaggagccagagaagataggacgctagtcttattggaggcaatgttgggatactacccttgtttgaaggatgctctaacctcgacctgtaagccaggccagggacagtgtcaggtgggcagtttgactggggcggtcgcctcctaaagtgtaacggaggcgctcaaaggttccctcagaatggttggaaatcattcgcagagtgtaaaggtataagggagcttgactgcgagagagacaactcgagcaggtaggaaactaggacttagtgatctggtggtaccgtatggaagggccatcactcaacggataaaagctaccctggggataacaggcttatctcccccaagagttcacatcgacggggaggtttggcacctcgatgtcggctcgtcgcatcctggggctgaagtcggtcccaagggttgggctgttcgcccattaaagcggcacgcgagctgggttcagaacgtcgtgagacagttcggtccctatccgtcgtgggcgtaggaaatttgagaggagctgtccttagtacgagaggaccgggatggacgcaccgctggtgtaccagttgttccgccaggagcatcgctgggtagctatgtgcggaagggataagcgctgaaagcatctaagtgcgaagcccccctcaagatgagatttcctttgcgtaagcagtaagacacctcagagacgatgaggtagataggctgggagtggaagtcctgtgaaggatggagcggaccagtactaatcagtcgaggacttgaccaaagcgaagcaaactggaaggttttttgcgagaaggattatgtttagttttgagtgtaaaagctcaaaagagtacggtggcgaaagcaagaaggatacacctgttcccatgccgaacacagaagttaagcttcttaacgccgaaagtagttggtgggcaactgcctgcgaggaaaggaagctgccgtgctcttttttaatattccggcttagctcagttggtagagcgcttgactgttaatcaagatgtcgtcagttcgagtctgacagccggagtactttgtatggaatgttgtccgagcggcttaaggagcatgattggaaatcatgtatacgggcttatacctgtatcgagggttcaaatccctcacattccgtaaatatatatgaattggaactatgttaacatagttcctttttttctacctaatttttcatatataatggagaaagggaggaaatatcgtgaagctacgaaaactaattccatttttatttttaatatctctattagctataacattttccgcttgttcgacaaagggagaagagaatactgctaagcatagagttaatattgtaacttctactaatatttatgcagatattgctaaaaatatagttggtaaacatggtcatgtacaagctattataaaaaacggcgatacagatccacatgattttgagcctacgactggctctgccaaagaagtagctaatgctaatattgttattgccaacggtctaggatatgatgactggatgactaatttagccaatgctaatgatattcatgtggttaaagttggtaatcaattgatgggattaaaacagggggataatcctcatatttggtataacttaaacatgcctaaaaagtatgttgattatctagttaaaacagcaagtaaaattgatccaaaacatgcagcatattttaagtctaatgctgcaagctatttgcaaaagattgatagtataaagaaaattgctgctaaaattaatgggcgtgaagataaaccggtttatgttagtgagcccgtgtttgattatgcactagaacggtgtcattttaagattggcaatcaggcatttgaagaagctgtagaaaatgaaacggatccgagtgcgcaagttattcatgagatgcaagtcaaaattaaagctagaaaaattgctttctttgttaataatattcaagcatcaagtagtacagttagtggcatggttaaactagcagagcaacataatattccagttctcgatgtaagggaaacaatgcctaatggaattagttattattactggatgaaagcgaattatcaaaaattatttgaaattttttaaaaataactattgcataattagggactatcaggtaatataataaacgttgtgattgagagatcacggtggtaataactaataaaaataaataaaaaaagttcttgacttttaaaacatgattagttattataataaagtgctcttgattaagagatatgacccgttggtcaagtggttaagacacggccctttcacggccgtaacatgggttcaaatcccgtacgggtcactaatggaggattagctcagctgggagagcatctgccttacaagcaggaggtcacaggttcgagccctgtatcctccattgttcgggactaccgccgccgcggtagtctttttttatgcaaaaagaacgaacaagcaaaattattattttatcggttcaagtcctgagaggattcactatgattagtgaagatgccttgtaaccgaatagccaatgtctatatagggggactaatatggaaagacgtttgtttacttcagaatcagtttctgaaggacatccggataaagttgctgatcagatttctgatgcaattttagatacgatgttaaagaaggatcctaattcacacgtagcttgtgaaacgatcgtaactactgggatggtttttgtctttggtgaaatttctaccaacgcttatgttgatattcaagatgtagtgcggaagactattttgaagatcggctatgatcgtccagaattaggttttgatggcaataactgtgctgtgatggttgacatcgatgagcaatcacctgatattgctggtggggttgatcactcacttgaaactagagaaaacaagtctgataacgatgaattggatcaaattggtgctggtgaccaaggtttgatgtttggctttgcgattaaagagacacctgaactcatgccattaccaatttcgcttgctcatcgtttaatgagacgtgttgctgctttgagaaaagaccatactttagattggcttcgtccggatgctaaggctcaagtcactgttgaatatgatggaaacaataagccattaagagtggatactgttgttatctctactcaaactgatgcagaagtttctaatgaagaaatccatcgggcaatgattgatttagtcattaaggaagttattccggccaagtacctagatgaaaagactaagtttttgattaatccgtcagggcgttttgttattggaggtccaaagggcgattctggtttaactggtcgtaagattatcgttgatacctatggtggttacgctcgccacggcggtggtgcattttcaggtaaggatccaacaaaggttgaccgttcagctagttatgcagctcgttatgtcgctaaaaatattgtggctgccggccttgcttatcgctgtgaagttcaattggcttatgcaattggtgtagctcacccagtttcaattatgattgatactgcgggtactggtaaggttgacgatgatttgttaactgaagcagtacgcaatgtttttgatcttcgtccagccggtatcattaagatgcttgaccttcgtcgtccaatctatgaacaaacggccgcatacggtcactttggtagaacagacgttgatttgccatgggaaaagactgataaaacacaagatttgcttgattatattaaaaataagcaataaataaaaagagaaagtaaaaaagaatgaaaaaaacaaacgtgcctatagtcacgcttgcgatttttatgacaacttttatgactgccattgaagggacaattgtttctactgcaatgccaaccatagtttctgacctagatgggctcgagattatgaattgggttatatcaattttcttgctaatgacggccgtttcaactcctttatatggaaaactggcggatagcattgggcggaagccagtttttttgtttggaattgcgttgtttgtcataggctcatcgctgtgtggacttgcacaaaatatggtggagcttatcttattcagagtaattcagggattaggttctggcgcggttcagccagttgccatcaccattattgcggatttatatgctctgcaaaaaagagcgaaaatgttaggtcttaactctggtttttggggagtagcatcagttattgcaccgctattaggtggctttatagttcagcatctatcctggcactgggttttctacatcaatgtgccaattggaataattgcctttttgctcgtaattttttgtttgcaagagcctaaacatagctctaagtctaagttagatttgcagggaaccatttggttagtaattttattgctagctttgatgtttttcttacaagatttaggttcaaacactaatatcgccataatggccgctctagccgttttagtggtaattagtataattatgttctttagagcagaaaagcgcgcagttgatccaataatgccactcactatgttaaaagataaggagttccttgcaattaacctgattacgttattgatttctggcgtagtaatcggctttgaattttacattcctacctggatgcaaggtattaatggtactaatccatctctagccggttttgctgtaacgcctagttcattaatgtggattgtaggttcgttcttaattggcgggatgctaggccgctgggggattaaaaagacatatgattatatgttattggttttagttgtggccgatttggttttgattttagtgccgatttacacatcattctgggtcttctgtgttattgctgcctttaatgggaccgcctttggggcaattacgacagcttcacaggtgagatcgcaggttttggtacctaaggatgacataggcgttgccacttcgtttaatacgctgatgaagtatctgggacagacaatgatggtttctatctacgggattgcttttaatacgatgttggcgcatgggttaagcaagagatcggggttgaatcaagaaatgatgaataaaattgtttctgcagaaaatgccaaaagtctggctgccaatgtagtgccacaattacggcaagttttgttaggcgggttaaaagctgtttacgttgtttctatgattgttattgtagtctcgattgtattgaatcaattgtatcgagatcgaaaattgaagaaaaattaagttgaaggagccacatgcaaagtagagcatgtggcttttttactggaaatttaatttcagtatttttattatatctacatatattgaaatattatttctatgaaagtaaaatagagttaaaagcaaggtgattaaatgaatgttagagatagaattttagagaattatacagagttaaaaaaatcatcacgtattattgctgatgcggtacttgaaaatccaaaaattttgttaaataaaaatgctaaagaaatagggaattatactaatacatctgcagcatcagtaattcgtttttgtaagcaattaaattataaagggttaaaggactttcaaatcgatttagctcaaagtactgtcaaacagtcacaacttaagccaatagatatgattgtaactaaagatgacaaagctgatgaagttatgactaaattaagggttagtttgagtcaaaactttgaagatttatctaagactattgatatcaaggatttacaaaaagctgtatccttaattaaaaaaagtcgagctgtgtatatagctggtattggggcttcaagcttttctgctaaggatcttttttataaactcattagaagtggaaaaacggttttttataatgatgatgtccacattgcattagagagaatatactattcaacgccaaaagatgtcatgatatgtttttcttatagcggattgactcaggaactattacttgcagttaaacaagctaaaaaaaataaaacaccaattgttgcagtgactagaaaatccgaatcccctttgagtaaattagcagatataaatttaaaattaccggatcatgaatcgctgatgagagttggtgctataaattcaacttttgctcaaatgtttatttcaaatgtgctttatttatgctcaatttcaagtgatttaggtgaggtaaaacaagaaatggaggctacaggaaagcttctcgaaaaattaaaagaaaggaatgattaatatgaatatcaaggatttaactacagagaaaagaaacagtgcaactatgcatatcgataatatgtcaactttagatatggttaaaactattaataaagaagatcagaaagttgctgaagcagtaggaactcaggaggagcaaattgctcaggcaattgacatggcttctaagaaataccatgatggtggacgattaatatatattggagctggcactagtggaagattaggtatattagatgcagtagagttagtaccaacgtatggaattagccctgatcgtgcaataggattaattgctggcggtaaaactgcaatgtatttagctgttgaaggtgcagaagattcagaatcacttgctgctgaagacttaggtaagctaaatttaactagtaaagatgtagttctaggattagctgctagtggtcgaacgccatatgttattggaggattagactatgcacaaaaaatcggtgcagggacaatttcaattgcctgtgttaataatagtttaattggaaaacatgcagaaatagctattgaagctgtagtagggcctgaagtaattactggatcaactagaatgaaagcaggaactgcacaaaagatgatcttaaatacgatttcaacgggcgtaatgattaaacaaggaaaagtttatcaaaatgttatgattgatgtcttgcctactaataaaaagctagtaaatcgagcaattagaattattacgtcagttactaacgtatcaatagagcaggcgaaagatgtcttgcttaaagctgataaaaatgtaggattagcaattgttatggcaaaaacagggttaaatagtgatgatgcaagtaaactattagaaaaaaataataacaatgtcagccaagttttaaataattagctatactttgaaattaaatttcaaaaatcattgattatatgtcttaaaagtgatatttttatatttaagtaagcgcttactaataaagaataatgaaatattatttctatttgtacaaaaattgcatattagtgattgctttttcaaaagagttttgataatactactttgctaatgaatattagtaataagtaagggagggagaataatgaaacatcgcaattttttattagttgctctttcagttttacttttaggagcaggcttaactggatgcagtcagaaaaaagaggctacagctactccggctgttacacctcataagagtcaagttgttacaacaactatgtattcgaaaaaattacatatggattggaattatgatgtatatttaccagcaggttacaatccaaaaagcagtaaaagatatcctgttttatatatgttgcatggaatctatggtaatcatagaaacttgctagaaagatttaattctcaacaaattcttgatggagaaattcatcgctgtaataaaaagatgatcgtagtttttgttgatggctttaatagcttttatattaatcaaaagcaaggtgggatgcagatggaaagtgccatcgttgatgacatggtccctactattaataaattgtataagacagaaaccaatcctaaacatgtaggtattggtggtatctcaatgggtggatatggtgctgccagattggctttgaaatatccagatatttttggaaatggtgttctaatttctcctgcagtttggtaccgcttgccgaataacaacccaattaaaacttcacagtatgcttttcaagatggaaaaagtaactgggattggaaattttatgatagtgtatttccaactaggtacattaatagtaaatcagagaaagataagttctttgtagagactacttcaagtgatactaccgttccagtaaaaaatgtcgatcgctttgtgaaaactcttaaaaaccatgacattagtgttaagtttgtaagagacaacggtggcaaccataattgggcttattggacttcagcagctccacaagcttatcaatgggcattagataatttaaattaggaggtgtaaaaaatgagcaaagatagtgaattagccagtagcattttgaatgatattggtggtaaagacaacgtttccgcagttatttcatgtatgactcgtctacggattagtgttaaagatgattcaaaaattaatttagatcagttaaagcggcttaatggagttttaggagtagttcagtctgaaactttacaagttgtactgggaccgggaaaggttactaaagttggaactgaatttagtaaattagccggtgtgccacttggagaagaaggcggcgatgattccaatgaaacattagatgaagttaaagctagagctcaaaaaaataaagcggcacaaaaagctaaacatgataagcctttacaacgtggattgcatcatattgctaatgtttttattcctttacttccaggaattattgctgcaggtttagtcaatggtatctgcaatgttattgattatcaatctggtagtgcttttgccaatgattggtggtatttaactattaaaacaataggatggggactatttgcattcttaccaatctttgtagggatgaatgcagctaaagaatttaaaggtagtgcaattctaggtggaattggtggtgtattctgtttaaatttaacaggttttgctgcgtaccctttaaattcactggcagtatcaatgccattcactaataagccatatgttgctggtgttggtggtttgcttaccgcactgtttatggggatctttatcgcatggacagaaagacagattagaaagtttatgcctaatgctttagatacattcttaacacctctttgcaccctgatcttttgtggtttaatttcagtggttttcttacaaccagttggtggttggctaaccaatattatttacgtggctatggacttcttatatgataagttaagctggttcggcggttatattttatcgtcaactttcttagcattagtatctgttggtttgcatcaagctttaacgccaattcatgttatgctgaatgaccctactggtccaactcatggaattaactatttacttcctattttaatgatggccggaggtggtcaagttggtgctggttttgctctttggcttaagagcaaaaataagcgttttaaaaatatggttatgagttcaattcctgtagctattttaggagttggtgaaccattaatgtatgctgtgaccttaccattaggacgtccatttattacggcttgtcttggtgctggtttcggtggtgttgcagcatcattattccatttaggtactgtctcacagggggtatctggattatttggactgttaattatgcagccaggtcaacaggttgaattcttgattgctttgttaatttcttatgtaggtggctttgttttaacatggttctttggaatagatgaagcaagaattaatgaagtctttcctgaatgataaaattaaagaagtaattgaaatcattgtaactattacaatgatttttatttttaacggagaagaaaaaatgctaggaatatctgtatatttccaagattatgatgaaaactatttgaaaaaagcagctcaagctggtgcaaaatacgtttttacgtcacttcagattccagaagaagattattcagatctggatcaaaaattaccgagattttttgaattgtgcgatgaattgggacttgaagtaattcctgatgtttctccggctacattggaaaagctaggaattaaaggaggcgattttgaagccttaaaagataagggattcaaggccttaagattagattatggttttgatgactttgatttaatcaaaaagctacaaagaaatttctttattttattaaatgcaagtgttgtgtcactggactatttagatcgtgccagaaatgcaggggttgattttggtaaattagctttaacatataatttttatccgcatacagatacaggtatgggatggacagattttaaacgtaagaattggatgttaaaggactatggcttaagaactcaagcttttgttcctggggatgcacttaaacgtttcccactatatgaaggcttgccaactgtagaaaagcatcgtggagtttcgccttacgttgcagctgttgaattaattcatgaagcaaatgtggatgatgtgtttattggcgatagcaaggcatcaatcaaaaatcttcggtatattgtagattatcaaaaagataatattttaaacatagaatgttcgctattgccacaatatcaacagctgtatgatcaagtgattgaagtaagaaaggacatgccagaaaagctgattcgcttaagtttgcctagaaaacctgatattccaatttgtaatactttaaataggcgtaaaggcactattacaatgcaaaacaaattagctcaaagatatagtggtgaagttagtctgattaagtcaaatttaccttttgaagcacgtagtaatgtgattggttttatttcacctgagtatgtgaagttgcttgattttattgattcgagtacgaaaatcatttttagaaggctgacatagaagaaaggtgatattatgcttaatttggcaaataagatttcagatgtatatcctaatttgaataaaacttctaagttgattgctgatgtttattttaaagattcaactcttttcctaagtaaaaacttgcaggaattaggtgctattactaaaacaagtggcgcatcagtgattcgattttgtagaaaattgggtttcaaaggctttaaagattttcaaatagcttgtgcacaagaaatacctggcaagcaagataatacggtggatacaattattaatgaaaatgatgagccgaccagtgtgctttacaaattacagattagtttagaaaaaaatattgcagacattggcaaaacaattgatcatcaatctctagcttcagcggtacaattaatgcgagccgcacagaagatttatgtagcaggagagggtgcatctggcttagccgcacaggatttattttacaaattaattcgtagcggaaaagatgctgctttcgtccaaagttcgcacattgctttagagcaagtagctaatattaagacagaagatattttaattaccttttcttatagtggattaactcaagaaccactgctaatggcaaaacaggcgaaagaaaatcaagctaaaataattgcagtaactcgtgcccagaattcgcccttaaaggatattgctgatactataattgcgttaccatcaaatgaaaaattgttgcgttacggcgctgttaattcactatttgcagaaatctttgcttctagcttgctatatttgagtcttatttcgccaaatttaaaagaactaaatatgaaaatgaaaactacgcaaaatttgactaatcaattaaaagtgtagaatctataaaataacaactaaataaattttaaaaaatcaaaaatattttcatgatgaaaataataaaaataaagaaaaaaaggaccagtttggtccttttttagtactttttttgcggttggaataaatctatatttgacaatgctataattataaatggaaagtggcctaaaaataagataacactattgaaagcgcattatttgcctccttgaaagtaaatctaagtagctgtacacttaaattgagctgaataacgaacgttattttttggcagagacttgtaatgcgagtaggaattatgggggcgtaaaaatggatattactagtttagcaagattccaatttgctatgacgacgatctttcactttttcttcgtgccattttcaattggtacgatattcgttgtcgcaattatggaatcaatgtatgttcatacaggcaagcctgaatataaaaagatgaccaagttttgggctaatatctttttattgagttttgccgtcggtgttgtaaccggtatcattcaagaattccaatttggtatgaattggtccgattattctagattcatgggggacatctttggtgctccacttgcttttgaagcattgttgtcattctttattgaatctacctttattggtttgtggatgtttacttgggataaagtggggaagaaattacacttattctttggatggatgatcgtctttgggacaatgacttctgcattatggattttaacagcaaactccttcatgcagcatcccgtcggctttgctttacgcaacggtcgtgccgaaatggctgactttggagcacttcttaagaatccacaattaatgtatgaatatggtcacgtaattgttggtgcacttttaactggtactacaattttgactgggttagctgctttccaactattgaagaaacgtaacctttcagacattaacaagaagatctatcgtaagacaatgcgtttaggcttaatcttaatgttaattttctcagctggtgaaattgctgtgggtgatatgcaaatgcaatatactttgcatgatcaaccaatgaagttcgccgcaactgaagctgtttataagacaactggagaaaaggctccatggacggtagttgcaattgctaatccaaagacccatgaagttaagggaattgatattccagacatgttaagtattctttcttaccacaagactactggttctgtaaaaggtatggaagaaattaacaaagaacttgaaaagaagtatggtacacatattgatggtcgcaagatggactactatgtaccagttaatactttattctggtccttcagagtaatgtgtggttttgctgcattattattcttgatggcaattgttggtttaatcatgactcgtaagaataaagaaaccctttataaccatcgttggctattatggatcttcgcacttcttacattctcaccattcttggctaacactgccggttggttaattaccgaacttggccgtgctccatggacagtttatggattatttactattgatcaaagtgtttcaccgaatgtttcagtggcttcacttttaacatcaaatattgtttacttctgcttatttactattttagcaattatcatgattgcattggttgttcgcttcatgcacaacgatccagatgaatatgataaggctcaagaggcaagcaaagtagttgatccgttctcaaagggggccatttaaaatgtcatttttacaaatactttggtttatcttaattggagtattgttctcaggcttcttcttccttgatggttttgactttggggtaggaatggccgtgaagactttagctcataatgaacctgaaagagatcaagttgttaggacaatcggaccagtttgggatggtaatgaagtttggttgattactgctggtggtgcaatgtttgcatcattcccatactggtatgcaaccttattctcaggttactatttaattttattattgatcttagttggcttaattattcgtggtgtgtcatttgaatttagagcaaaatgtgctccatatcaaaagcatatttgggataatgcaatggcgatcggtagcgtaatggccacctttctctttggggtaatgtttatctcaatgattaaagggatgccaatcgatgctaaaggcaatatttcagctagcttctttgactactttaactggttctcaatcgttggtggtattgctttaacacttctttgctatttgcacggcttaaactatattactattaaaactaagggcgttatttcagatagagcacaaaactatgcacaagctttatactgggtactctacgtcggtgaagttgtctttgctttattattgattttccaaaccgacttcatgagagtacatccaattgcaactttagtatgcttagcattaattgttggtttctctgtagcagcacatgtagctactttcactaacaagcaaggaatggctttaacttgcagtggattaacgttgatctcattagtcgccttaatcttctgtggtttattcccaagagtaatgatttcatcaatcagcagtaaatatgatttgttgattcatagtgcatcatcatctaactacactttgattgttatgactgttgctacttgcatcttggtaccatgtgtcttggcttacaccatctgggcatattggatttttcgcaagcggatttcaatgccaagaatcggagaggttaaataatgattgataaacagctatttaaaattgatggcgctggttcaatcttaaaaaaacttgcagggcttgagattctgcaagctttttttatagtaggacaagccttggcactagcgtcagtcttaagcaaattgtgggcaggtcaacctctcgattggctactactaattacttttgcagcttgctttatcgccagacaattgatcagcacactgagagattcaatgttagaaaaatattccggtcgggttgcagaagaattaagacagcagcttttaaataaagtctttcgtgatggacaggctttagtacaaaaacaaggaaccggtagtttgattactatgtccctagatggtgttgatgaggtcaggcaatacattaagttaatctacagcaaagttttaacaatgatgattgtgccagttttaatctttgtcggcatgctgtttttaagctggacatcagctgtgattctgctagtcatgtatcctttaattgtcttattcatgattatcctaggtcatgctgcacaggatcgagcaattaaacaatttggtaactttcaggttttatctaataactttattgattctttaaggggaattgatacgctgaagtatttaggcctgagtaaaagatattccaagtcaatttttaacttgagtgagggttttagaaaaaagacgatggcggtgctaaaagtagcaatgctttcaacttttgccttagactttttcactaccttgtctattgcaatcattgctgtttttcttggttttgacttgatgaatggtaaaattgcactttttcctgctttaggaattctgattctggcgccagattattttttgccaattcgagattttgcgggggatttccatgcaaccttgaatggtaaaaatgcctttaagcggatcaacgaattgattaatctgccagaggaaaaaactaatgatttacctttaaaaacttggtcagctcaagatcaattgaagatcaagaacttgaagtttacttatcaaaagggaaccgaaattggaccggtttcattacaagtccaaggattcaagaaaattggcattatcggaatgagcggatctggtaaaactagtttaattaacctgctcagcggctttttgactccggatcaagtgcaaattgaactacaagggcagaaaactacgaccatgaatattcctgcttggcagcgtcaaatgacctatattccgcaggagccatacgtttttactaagagcttgcgtgaaaatattgctttttataatccgcaggcaagtgatgatgaaattaagcaggcgattcatatcatgggtctggatgccttgttaaatgatttgcctaacggacttgatacggtgattggccgcggtaagcgtgtcttgtctggaggtcagtcacaaagaattgccttagcgagagcatttttggatcctaagcgaaaaattatgatcttcgatgagccgactgctcacttagatatcgaaacagaaattgacttaaagaagcggatgatgccattaatgcaaaataaactggtcttctttgcgactcacagactgcattggttaaaagaaatggactatattctagtgatggatcacggtcaattggttgagcaaggaagttatgagcaattgcagcaaaatcaaggctacttctgcaagttaatggcaggaatgagaggtgaaaacaatgatcaataagattccggttttaagagcattaaaaaatgatcgttgggttcgcccatatttggaaaaatatcgtaaaacgttgattttggcgattgcactgggcattttaactttcgtctgtggcgggggcttgatgttctgtgctggctatttaatcagccgttcagcagctaaacctgaaaatattttgttaatctatgtgccaattgtcttaactagagcatttgggattacgcggccagctgtccgttattttgagcggctggttagtcacaattgggtgctcaaaatgacctccaaatttagacaacagctttatgactcattggagcgcgatgcgactatttttaatagtaagtatcagctaggaaatattctgggacttttgtctgatgatgtcagccatattcaaaacttttacctaagaacgatctttccaatgtttgtagcttggggcttgtatgcaattatcgtaattggcttaggcatcatttccccactgatgggcatttggatgttgatcctgtttttcttgattatttttgctattcctatttggtcagtcttaatcaatggtgcgcggcaaagctatgaaaaaacggttcaagacaagctctacgttgatttgactgataatgtgatgggagtagatgactggattttgtctggccgcagcaaagaatacttggccttgcatgtcaatgatcaagataaatttttgcaaatcaacgcgaagatgaaaaaatttgatcgctggcgcgactttgttttacaaatcttctgggtgttggtaattgtgagcctagtaatttggggtgctgccagatttggcgggcgttcaacttattatactaattggattgcggcatttgctttggcattattcccgactgttgaggcttttgccagtttgccgactgctgctcaagagacgaatatctacaaagattcgcttaagcgtttgaataatttgccagctcctgatcggactaagcataaaccaatcaaattaaccgcaccgtttaatttagtattaactgatgtgcattatgcctaccctcaaactaataaagaggttttgcatgggatcaacttaaatatccatgatggtgaaaagattgctattttgggtcgtagtggtgcgggtaaaagtactttagctgccttgctcagaggtgatcgggtaccagctaaaggacacgtaactttaaatggaattgataccagcaagtttggcgatcaaatgtccaattactttagcatcatcaatcaaacgccatatttgttcaataccacgattgccaataatttgcggctaggtaatgaagatgccacagatgagcagctatgggacgttttgcgccgagtaggtttggccgagatggtgcaaaaattaacggatggccttgatactaaggtggatgaggcaggattacgcttttcaggtggtgaacgccatcgtttagccttagcgcgaatcttactgaagaatacgccaattgtcttacttgatgagccaacagttggcttggatccaattacggagcaagctgtaattaatatgtttattaaggaattatccggtaaaactttaatttggattacacaccacttgcaaggaattgatcagatggatcaagtaatttttattgaagatggacaaattaatatgcagggtacaccggaaaaattatggcagacagagccgcgttatcgtgaattgaaaaaggctgatttaggattatagaggttcattatgctaacgaataaagtgccagaacaagatgtgcatgacctatttactagggtcgcacctaagtatgatttgatgaataatattgttagtttagggattcaaaagagttggcgtaagaaatttttacggcagttagatttaaataaaaattctatttgcttagatttgtgttgtggtagcgctgattcaactattgatttgactaaaaaagctaaattagtgactggtctagattttaaccaggagatgctgaagattgcccaaaaaaagattcgtcaaaagcagctgcagtccaagataaagttgattgcaggggatgcaatgaatttaccttttgcggccaatagctttgattgtgtaactatttgttttggcctgcgtaatgtccctgacgctgttaagacgattcaggaaagctaccgcgtacttaagccgggcggacaatttgctgttttagaaatgtctcagcccactaatgcattagttaaattgggctggcaagcttattttaaaatttttccgtattttgctaagttgacacacggtaatatcaaggactaccagtatttgtcaaaaacaagtaaagaatttctctcggctgagcaattaaaaaagctacttgagcaaaatggttttactcgagtagcggttactaagttaacttacggtgcaggtgcgattcatttgggacgcaaagactaaagcgttcgattgactaatttacgcgtcatctttttgagcaagacggtcgcattagtttgcggcagttgggctaagttagctaatgcccgattagtgtattgttcagctaaggcatgagtttcttcaatgactgagctgtttagcaaaatcttttggatttgttcgatatcgtttttgctcatttgtcgctttttttcaagtagcggtactaattgctctcgtaattcctttttgctaagagctagcagaataggtagagagtagacgccggtagtcaaatcttctagcgttggcttgtttagctgcttgccgccagtgtaatcaagaatgtcgtcaacaatttgaaaagcaatgcctaaattttcaccaaaggaggctaaagcttgagtagtttgctcatctccattgccaaaatggcttccttcttcggcagctaaacgaaaaagtgcagctgtctttcctttaacattagttaagtagtcgttgaaatcttggcttaggttaaaacgttcagccatttggcctaattcaccagcaagtaaatggtgcattgtgtgagcatttttgatcatgtaatcttgttcggaaatggcgttcaaaattaggtcaaaaaagtgcgtaaaaagcaagtcgccagcgtaaactgcggtgtctttgccaaaacgggcttggatgctaattttaccgcggcgctcgtcagaatcgtcaatgatatcatcatgaattaatgaggccatatgcaaaatttcgattgatgaggcaagttgaataatttgttttgatacagtttcttttttgctagcaatttgagctgacaaaattagtaaactaggccgtaaatatttaccaccgttactagccatttcaaggagtgcatcttgcaagtctgaatatggagtgcggatggttgcctgaattaattgattaacttcttcaagcggtttacgaataagtggatatttttgccaaggttgagagttattcatgatagatttccttataatagagttaacagaatagtgatcctttgaaaggatgtggatcgatgtcattaagtgtatttttagaattaattgagattaaagcaaaaaccgctagtgtcattccctttttcttagggatgtgctacagcgtgtattattatcaccaagttaactggggatttgccctagtcttcttcattgcaatgctactatttaacatggtagtagatatgtttgataactactgtgattattatcacgcagatagcaagaattaccaagagaagactaacattatcgggcgagaaaatatttcacctaatttagttctgggattaattatttcctttagtcttattgcaattttattaggtttgtatctagtcgctaaagtaggcttgcctgtattgtggatgggcttgttctgttttatggttggttatttatattcatttggtccgcatcctatttccagcttgccactaggtgaattgttctctggtttcacaatgggcttcatgattgtactgctcagtgtttatatcaatagttttcaagcttttgattggaactggatcacaatcggtcgtatcttcttattagctttagctgataaattatggatttctaatttaatgctagctaataacttatgcgatgcccaagaggacgaggataatcaccgcaccacaattattcactttattggtaaaaaaggtggcttgattgcttttagtatcaaaaatgttttagcatttttagtaatcttcctcctaccgtttttgggaattgctcctaagacggtttggttaacagtaataattgtaccgttcgtttataagcagaacaagatcttaattggtaaacaagttaagacagagacatttatcacaggagtaaaaacgttgctagttggttcactgacttacttaataacttactttttaggaattctattttagagaggttgaaaattatgaaaacagttgtagttttaggtgctggttttgccggcttgaaaacagttgtcgctttgcaaaagaagttgcgtgaacaagttaagattatcttagttgaccgtaatccataccactacgaaacaattcgcttatatgaagtggctactggtgaaattccctacactgggatgtcatatgaaattaatgatgtaattaatccgaagatgactactgtgattacggatgaagttgaaaaagttaatattgctgataaaacagttgagttaaaggatcatgctccacttaaatatgactattgtgttgttggcttaggctttaccttgagcaatatgggcattaaaggtgtaaccgaaaatgctttgccaatgagcaatgtaaaacaagctgaagctattcgcgaccacctttatgtcgaaatgaaagcttatcgccaagaccatgattctaaacacctgtcagtagtaatttgtggggcaggttttcaagcaattgaattaggaaatgccattgcaaaggttcgcccagaactagctcaaatggctggcgcccaaccagatgaaattaccatcagaatgattgatggttcgccacgtcttttgccaatgttccaaggtaaattgcttgattacgctttaaacacaattaagaaaaataaagtcgaaattattaagccagcttatgttaatgaagtaacctctacctcggttttgtataaaatggctaatgaaaaagacaatgctgagctgcaagaaattaaggcaggtactagaatctggatgatgggctttagtggcagtccagtaattgaggcatctggatttaagaaccgtcgtggtcgggtcatggttggtgatcatttaaccgcgccagaaagtgatgatatctacgtcttaggcgatgtttcaagcgtcatggttcctggtaagaaatggccatatcctaacactggtcaattggctctttcaatggctaactacgctgcaaaagatattaagagcagaattatgggtcaaactagaccggataaatatgcttaccatgacttaggtgtagtagttaacttgggtaattcagaagccgcaggattggcaatggggcatgcttttaaaggatactttgcagcaactcttaagaagattaccattgataagtcggttcttgaaactggtggtattaaagaaacaatggcgattggtcaatttgacttctatcactaaaattgaaaataaaagagaataaaaaatcacttcagtttgatttgatatgaaccccaaatttgggacatattattgaactgctttatttaaaaccatatttcgatattctatcggagtatggttttttagtactgttttaattctttcatgattgtagtaatgaatgtattaggactaaagtgtgaagttgcgccattttatgtcacaccaagaagacctgctattcaccacactatgggtggcttagtaatcgacactaaggctcatgttttaaataaggacggtcaaatcatcgctggtctttattcagcgggtgaaaatgctggtggtatccatgccggtaaccgtttaggaggaaattctttagcagatatctttacctttggtagaattgctgccaatactgcttatgaggataagcatgttaccgatgttattactggcgcttcgcagaaataaagatagagtataaaaaaatacagatatatcaatttaaatattggtatgtctgtatttctatttggagtcattttttccttaccttcgaataaaaacccatgatttctaattcttactaacaaaaataatagtaacttttctaacttcccaaaaaattttgcgacttttttgcgtaataaataatagaggataaatatcctcaaattatttaaggaggactttgcatgagcaaagagaaagaactaaatgtgtctgaagcattaggttttacggatgatttgatgtttcagaatgttatgagagatccagagatctatcgtatgtccttgaatgaggttctaccacatttggacattcaagatatcactgtatgcacgcaagaaaggattgcttttaaccaagaagagaaagtttcgattcttgatgtcctgattacggatagcagaggcaggcgttacaatgtggaaatgcaggtcgcgcataaagcagacatggataaacgagccaggcaatacctgttcaagatgatggaagatggctttttacgacgaaaacaagaatatggcgagctgcacgctgcatatgtaatttttattctgccgtttgatcccaaaggaaaaggcttgaagcgatatacttttgtttatactgctaaggaagacccatcagttgaattaaatgacgattctgcgataatatatttaaacacaaagggaacaaaaggcaagatcagacctgagcttgatgacctttatcgcatgattgaaggcaagccaacttcaaatggaaaactcgtcagtcgaattaaaaagtcgatgaacaattatcgtagaaccgaagaatggaggcaacacgtcatgaacacagaagaagtagcagaagcagcaaagcagcttggcatggaagaaggcatacatgaggcaactgttgcagcaatccataaaacgattaacatgcttagaaggatgaagcgcagtcccaagcaaatcttgcaagaattagaacaagattatggcaatgaattttctgaagaagaactagcagactttgtgaaaaacgcctagtcgataagatataatgatagctgtgaagctatcattttttagataacgggggcttgatcatgaataatcctgaagaattacaacattttttagatgttctgctaaaagagagtaactttaccagagcagctaaagaattatatatttcccagccttatttaacgcagctaattggacgaattgagaaaaaattaggcactaagatcatcaaccgagatgagagaccctatacgttaactcctgcaggtctaatttactatcaatatttggagaatgtttcatataataagcagcaattagggcgcaagctggaggcatatactcatcctgaccaacagataattaaaatcggcattttggagagcttaggtacatatttattgccagaaattttgccgcaatttttgcaagaaaaccccaacgtcaagattcagctatttgaaaatttccccagagaaaatgaaagaagactgcttaatggcgagctggattgttatattggtcagacgccagaagcacttgactcgagtttagatgtggttgcgggtggcgaggaacgctattacgtagtgatttcgccagcctcaccatattaccaagcaggaaagtttatcttaaattcggatgaacttgatctaaaagaggtactgcaggagcctttagtgttgagttcacctggttcagctatccggcatcaagttaatggcttatttcagagattaagactcgaaaaaaatattgtgatggagtctaatagtattattactgcaactaacttggcaattcacggcgtgggtattaccatttcttcggcaagtattatcagaagaatggaacaaacgccaattaacttgttgccactagatcgaaagttaatggatgttgtctttttcattactagcaaaagcggggaaaagtcgccagcgttagaaaacctaatttcaatttttcaaaagacgcatttacaagcaaaaataggataaagaaaaaggcatcatgcgatgccttttaaattgctttgatttctattgttttcgtttcatgtcgatcatcttcggctcaatgtagaagtgatagaggaaggaataaccaagcagtacaaaggtaattccttcaatccaaccgccgaatacatcagatggatagtgcacgtggacgaaaattctggtgtaaccaatcatcagtgggaataaagcccaaataataatcaataaagtcttccagaatttgcttctcactaaaagaatggttaggataatcaaaacaccaaatagcgccgcgctaccaactgagtgccccgatggaaaactataaccatccgcataaactaagtgcttgaccgttggacgctgccgcattgctgcgtgtttgataatccaattatagccattagcacagatcatgacaccagcggtaaaccaagcgtatgcatattgcttaaagaccagtaaaactatgaaaacaatgattgtttcaattgtgatcacgcttgtattgccgagattagtaaaatctttagcaaaagcgacattagctggattattgttgcaaacaatgttgaccacagcattatcaaaattgtgaataaattgtgagccggatgaaaccagtgcggcccagacagcataaataaccacgaagcagataccaggtattaaggtgtccttaggtggtcgtttcgtattaatcaaaaaagtactcccctcttgaaatttatagcatttgtggtaaattataatcattatctataagaaaataaaggtcgagaagtagtaacaaggatatttttttcagagagagactggttggtgcgaagtcttagaataaaattgtgaactcgtctcttaataaaacctagcgttgccatccgcgttaaggagcaattaagtgtcacaattttgtgaaacttaggtggtaccgcgatgattcgtcctatgattttttcatagggcgttttttgatagtaaaggagagtttatcttgtataaccacaaagtagttgaaaagaaatggcaagattattggtcaaagcatgatacctttaagacaggtactgaccctgataagaagaattattatgcattggacatgttcccattcccatctggtaagggacttcacgtaggtcacccagagggctataccgcaactgatattgttgcaagaatgaagcgtgcacaaggctataatgtgcttcacccaatgggctgggatgcatttggtttaccaactgaacaatatgcattgaagactggtgaagatccagaagttgttactaagaacaacattgctaactttaagcgtcaattgaacaagttgggcttctcatatgattgggaccgtgaagtaaccacttcagatccaaattactacaagtggacgcaatgggtttttgaacaaatgtataaaaagggcttggcatatgaagctgaagttcctgttaactggtcaccagacttaggtactgttgtggctaatgaagaagttatcgatggtaaaactgaacgtggtggctacccagtatatcgtaagaatatgcgtcaatggatgcttaagatgactgcatatgccgatcgcttattagaagaccttgatgatttggattggccagaacccgttaaggaaatgcagcgtaactggattggtcgttctgaaggtgcgcaagttactttcaaggtaaaagacagcgacaagacttttgatgtctttactactcgtcctgatactttatttggtgttagctatacagttcttgcaccagaaagcaagcttgttcaagaaattaccacacctgaacaaaaagaagcagttgatgcttacattaagaaaattgaatctaagtctgatcttgaaagaactgatttgaacaaagataaaactggtgtcttcactggtgcctatgcaattaacccagttaatggcaaggaagtgccagtttggatttctgactacgttttagctagctacggcactggtgcagttatggctgttccagctcatgatgatcgtgactatgcttttgctactaagtttggtttgccagttaacccagttattgaaggtggcgatattgaaaaggaagccttcacaggtaatggcaagcacttcaattctgagttcttagacggcttggataatgaagaagctaaaaagcgcatgattgaatggcttgaagaccataactgtggtaagaagaaggttaactacaagttgcgtgactgggacttcagccgtcaacgttactggggtgaaccaattccagttattcactgggaagatggaaccacttcattagttccggaagatcaattaccacttcgcttgccacatgcaactgacattaagccatctggtaccccggaaagtccacttgctgacttgactgactgggtaaatgttgttgacgaaaacggtagaaaaggtaagcgtgaaaccaacacgatgcctaactgggctggttctagctggtactacttgcgttacgttgatccacataatgataaggaattagctgactacgatttgcttaaaaagtggcttccagttgatctttacatcggtggtgcggaacacgctgtgcgtcaccttctttatgcaagattctggcacaaggttctttacgatttgggtgttgtgccaactaaggaaccattccagaagctttacaaccaaggcttaatcttgaagaatcacgaaaagatgtctaagtctaagggtaatgtagttaaccctgatgaggtgatcgatgaatatggtgcagattcacttagaatgtacgaaatgttcatgggtccacttgatgcatcaattgactgggatgacaatggtcctgcttcaactaagaagttcttggaccgtgtgtggcgcctctttgtaaacgatcttgatttgaaggccattccacaagaaagaatcgttgataagaatgatggtgaacttgacaaggtttatgcagaaacagtcaagaaggtaactgaagactttgaatcattacactttaacactgcaattagtcaaatgatggtcttcatgaatgctgctcaaaaggctaagaccattccacgggaatacgcagaaggctttgttaagcttttagctccagtggctccacatatgatggaagaaatttggcaagtctttggtcatgatgaatcaattacttacgctaagtggccaacttatgatccagctaagttagttgagtcaactgtagaaattatggttcaagttaacggtaagcttcgtggtaagttccaagctcctaaagacgctgcaaaagatgacttgcaaaagcaagcaatggaaattgaacacgtaaagaagttcttggaaggcaaggacgttaagaaagttatcgttgtgccaaacaagattgtcaatattgttgctaaataagttagattttcctaaaaaataataagaatacttattatttagatttattgaattgattagttgagacttttattgggaaaattttaatggaagaaaataacttaaatagcaaagatacacaaaatacttttctaaaaggttccgcatggatgacctttggctcaattgcctcgagaattttgggtgctttgtatattattccgtggtatgcctggatgggctcctacggcaatattgccaatgctttgactgcgcgtagttataacatttatacaatttttatcttaatctcgacagccggaattccaggagcaattgctaagcaggtagctaagtataatgcactaaacgaatatgggattggccgcaaattatttcgcaaaggcttaattttaatgaccgttttgggtattgtctcagctgcgatcatgtattttgcttcgccgcttttagcttcaaatgggagtcaaagtgatccaagacaggttgcagttatgcgtagcttgtcttatgcgattttaattattccaattttgagtatcatgcgaggctatttccaaggttatgccgatatgatgccaagtgcgatgtcacagtttgttgaacagtttgcccgggtagtctggatgttgctaacggcgtttgtaattatgaaattgcaacatggttcatatgttcatgcagttattcagtcaaacttagcggctgcagttggtgctttatttggaattggcttattaatttggtttttgttttctagaagaaaacaactagattatttggttgcccattctaataatcgcttgcgggtctcaacgactgaattatttggtgaaattattgcacaagcaattcctttcattattattgattcaggaattaccttattttcattggttgaccaatataccttccacccgatgattgccagtctagttcatgctagttcagatacaattgaggactggtatgccttgtttggtttgaatgctaataagttaatcatgattattgtttcgctggccagtgcaatggcggtaaccgcgattccacttttatcagcggcgcatactaggggagactataagagcatttcaaagcagattgctaatacgatggacctatttttatttgtaatgattccagctgcttttgggatggcagccatcagtaggccaatttatacagttttctatggtccagatctattggggagcaacgtactatatctgtcgtcatttaccgcgattagtttaggattatttacggtgctgatggcgattttgcaaggtctttcgggaaatggactggctatcaagtacctggttttaggattgattttaaaagggatcctgcaatatccaatgattttcctatttaaggtatacggtccgctggttgctactaatttaggtttattaattattgtggcactttctttaaaacatttggaagtgcagtatgattttaatttgaatcgaactagtagaaggctggctggagttacagcattttcagttggcatgttccttgtggttaaattatgtgaaatgggactaggcaagtttctcaatcctgatcatagatttaatgcattggtgctagtgattgtagctgtaggtgctggggttgtcttttatggcttggtgacattgaagacagggttagtccaaagcgtcttaggtagtaaggtagaaagtattttagttagactacatatggataaataaaagaaaatcaaactgttgtgatggcagtttgatttttttgttataaaaaattgcggctctttgtcaaatcttactgataaggtgtcaagtctaatttttcctggtagttgagtaaatttttggccgggggatggcttacttgagtaagtttttgtgcaatttctaagtgaatcaaccctaattgtcaaaaaactgccactccctcttgcaaagacgataattagtgttattatataatgcataagaaacgcaagaaatgtgtataaaaacaattatttttagcaaaggaggcaaaaagcatgattaatctgactgttaatacaatcaggcttagcggtgtcgctgcaagagcaaaccgcgtcatgttttaactgtcctttagacaaagtgaatcaaagataatttaacagcacagtattaagtacacccggtttatcggcggcatcgttaactgaagattttttgttatgcgtgttagctaatgaggtattaagatgaacaagggtaagactttaatgactggtgctgttatttttatgtgcgggagcatgctggcggcctgcggcaagagccaaggagcatctgtcaagcagaatttaaactggatgaccagtgcgaaaatcatcaccatggacccatccaaagccaccgacaccacgtccttccagcagattgaaaatacgactgaagggctctaccagctgggcaaagacagcaagccggttaaggtactggtcaagaagacgactgtcagcaaagacggtctgacctggacttttgaccttaagaaggggactaaatggtctaatggcgaaaccgtaactgccaaggactttgtctattcctggaagcggacggtgaaccccaagacagctagccaatacagctacattttctctgggattaaaaatgccgaccagatcgttgctggtaaaaagaaggccgatacgctgggcgtgaaagccgctggcaaatacaagctgcaggttagtctggaacataagattccatacttcaagcttttgatggccttctcagtctttttcccagaaaaccagaccgcagttgaaaagtatggctcaaagtacggtacgtcatcaaaaacgaccgtttataacgggccattcttgcaaaagggctggacgggctccaacttgtcctggaccatgttcaagaacaagaactactggaacgccaaagccgttaagctgcaaagcatccactttgccgtggaaaaatctccgtcaacggcctactacctctaccaagatggcaagctggacacggcaagcctgagctcacaagcctccaagaacctgcaaaagtcaccagactatgttgtaagaaagaccaacgggacgacttacttccaatttaacctgaaaatgaagaagttccagagcaccaagatgcgtcaagccatctccatggccctagacagaaacgccttagccaagaccttgggcggcggctacacgggctctaagaactttacggcagctggcatgaccaaggtgggtgacaaggattttaccgacctctctcaaaccaaggaaagcttgctagtaacgggccaccacaagcagctggcccaaagctactttaaggaaaggttgaaggaacttggcttaaagaagctgtcctttacggtgattacggcacacgtccaagtccatcggcgaatacttccagagtgctcttgaatcaacttttggcaagcaaatcgacgtcaaggtgcaaagcctgccaaccaagtcccaatttgccaagatggactctggtaactttgaagccacgatcagcggctggaatgcggactttgccgaccaaatttccttcctggactgcatgacctctactaatggctacaactcaggcaagtggatgaagctgctggcaaaggctgaaaacaccttgctggttgatcagcggctcttactacttcgaacacgtctacattgccaagtaagccagtaaaaaatgtattatcatgctaggtattatgtagtagaaagtgaagaataaagcgtaaattgctataattaagatagaaataagggaaaatcttaattagtgaaggagcgaaagataatgaaagactcaaattcaccaatttacaacatttggatggtggttctgctggttgccgcatatgtctggccaatctttggcttagcaccagccatctacctctttatcaagcgcaaggatgagaatctggtccctttgaagaattggattactctagccttgatctggcagattgttttgtggctgctcttgattttggttgtcgtctccttctgggtcggcgcctttgcggtcaaccacggttaactaaataactaattgaatagctagataaaagtcagtggatgccactggctttttgtctgcttaagcaaatgtcataactatatcactatttatagccttgaatagatttaatcggttacataatgcatcacgcaggtgatatctcacaaaaaattaacaaaagcatcaggttcaaagattgttaagccgatgttaaatagaactagcaagggtgaaagcggtacatttttttctttgttaagctaatgtaaactaagaaaaataacgttagaatattaaccgattttcgaaaaatggtaaagatttttccaaaatccggccagaatttaaacaaagttaagtattttactttgatttaacatttccccctgaatgtatttaacctccattaattactatttacttagtaagaattcaaggaggataattatgttaggcaagaaaactagagtagtggttatcgcacttgctctactggctatagtcgtcggctgcgttgttggcagttcaaaggcagacaccaagggtgtctctgggactgttaacgctgcggggtcttcagccctgttgccgctagtccaaagcgcagctaaatcattcatggatgaaaatccagacagcgtgatcaacaccaacggtggtgggtcaggccaaggtttacaacaagtctcagatggaaccatcgacatcggtgactctgacttgttcgcagaagaaaaattagacaagaagtccgcatccaagctggttgaccaccaagtggccatcaccgcgattgccccaatcgtcaacaaggacgccggggttaagagcttaaccacccagcaattgatcgatgtttacactggcaaggttaccaactggaaccaagttggcggcaatgactgcaagattgttttgatctcacgtcctgcttcttcaggtacccgggcaacttttgaacaatatgctttaaacaagactgccagtcgttcaaaccaatcactggaaactgacgactccggtactttgatccaaatgattcaaagcgttgaaggggctgtcggctacgttgccttatcatacttgactggtaacccagacgtaactgcagttgccatcaacggcgttaagccaactctggacaacgtttacaacggctcatacaaggtttggaactacgagcacatgtacaccaagggtcaaccaaagaaggctgctgttaaggcctttttaaagaagatgttaagtaaagaatacgaatcaaaggttgaaggcatgggctacggtgttgcttctaagctttcagacaaggctaagaaagaacacaagtaaaaggagagtgatttttcatggacaaggtagttcaaaaagccatcgctagcgataagcgctggcgggcagtatacattgcttgcgggctcttgattgttgctttgacgctcttgatgggggcattcctgctctaccaaggtagtcaaacctttatcaaggctcaccacagcatctgggaattcctgtttaccagcgactgggcaccgcttgacaagaccggcctgtttggcgggaaagtcggtgcagcagtttacatcgtaggttctcttgaaacctgtttgctggccctggttatctgcttgccatttgctatcggctcagcagtttacatgacggaaatctcaccaaagatcggtgaaaagtacttccgtccagctacggaaatctacgtttcaattccatccgttgtttatggttggtttgggatgaccaagctggttccattgattaaaaatattttccatccagccatgggtgggtactcagttttggccgcatccattgttttggccatcatgatcttcccaaccatcaccgcggtttccgctgacgccattaagtcagtgccaatgagctaccgtgaaggtgcttacggtttaggcgcaacccgctggcaagtaatcggcaaagttgttttgccagcagcttcaggcggcatcttgaccggggtgatccttggcttggccagagcgatcggtgaagccttagccgtagccatggttatcggtaagactcgctcatttgcggcaaaccttttgtcaccaaccagcaacttgacgagtgccatcgcagccgacatgggtaacactgcccaaggcggggaatacaacctggctctgtggaccatggcgctgctcttgttcatcatctcaattgtcttgattgtgctcattcacaaactggctaacggaaagaaggataaataatgaaccgtgctaagaaaaaagatcggtttatgaccggcgtcttttacgccatcggctggctgatgctagcattcttgctgtatttgacatttaccattatctttgatggcttgaagggctttagcccagacttcttaggggctgccggcaacgggatcttcaaccaattctttaacactctttacttagttttcctttcgctcttagtttccgtgccaatcgggatcggggctggggtttacctggctgaatacgccaaggaaggcaagctcttgaccatgctggaagtaagtatcgaatcactttcttctctgccatccatcgtaatcggtttgttcggctacctggccttcatcatgtggacgggaatgagctggaacatcgtggccggggccttgacgatctcaattttgtcaattcctttgatcactactgaaaccaacaatgcaattcgtgccttgccaattgaatacaaggaaggttctctaggtttaggtgcaaccaagtcagaaaccattagaaaagtcttgattccagctgctatgccgcaaatcttgactggggtcatcatggccgctgggcgtgggtttggtgaagccgccgctttgctgtacacgtctggtcaatccacttacatcaactggcacaacttctggaagattacttcacctacttcacctttgaatccattcagaagtggtgaaactctttcactgcacatctgggtcatgagaactgaaggggctttgaaccctaaggcaacccaaattgccaactttacttcagctgttttagtagtactcgcactgctctttactttagttacctgccgcatttcagacaagatgcgtaagcgcaataacggaggaaattaataatggaagacaaaattactatcgaaaacttgaacctttactacagtgatttccacgccttgcatgaccttaacatgcacattccaaagaatgaaatcacggctttcatcgggccatctggttgtggtaagtctactttgcttcgctgcttgaaccggatgaacgacctggttgaaggctgccggattgacggttcagttaagttagatggtaccgacatttatggcaatgaccttgacgtcactgttttgagacagagagtcggcatggtcttccaaagaccaaatccattcccaatgagcgtttacgacaacgttgcttacggtcccaagatccacggcgtaaccgacaagcaagaacttgacgaaatcgttgaaacctcattaaagcaagctgctatctgggatgacttgaaggaccgtttgaacaagtctgctttgggtctgtctggtggtcagcaacaacgtctttgcatcgctcgtgccttggctgttaagccagaagtcttgctgatggacgaaccaaccagtgcccttgacccaatttcaacttcaaagattgaagaattggctctgcaactgaagaaggactacaccatcgttatcgttacccacaacatgcaacaagccgtgagaatttctgacaagactggcttcttcttgctgggtgacctggtagaattcggtgaaactgaccaactcttctccatgcctaaggatgaaagaactgaaagatacattactggtcgtttcggttaaagaccagtaataattagatagagtaagaaaggcagaaacaatgactagatcaagatttgatgaagaattggacaacttgcaaaagtccatggaagacatcggcaagctgtgccaggaagccattttggaagcaaccaacaccttgtttacgggcgactaccatgaagctgaagactcagtcaacttgcaccgccgcatccacaagagcgaacggaaaattgaagacagctgcttgcgcctgttgatggagcagcagccagttgcgactgacttgcgggtgatcagttcttctttgaaggccgtttacgacctggaaagaattggggaaatctctgctgatattgcagaactcgtgttaaatgaacacctgtccatcgccaatgaccagctgaaccttaagtccatggtgcaaacctcaaccagcatggttgatgatgccgtaaccgccttgtccaccaagaatctggaactggcgcaagcggttatcgaccgcgacgacattgttgacgatgactttgaccatgcccgagaaatcctgatcaacaacttcagcaaggatggcaatccagaatacctgatcaacctgatgatggttgccaagtacttggaaaagatcggtgaccacgcggtcaacgttgctaagtggaccaagtttgtggcaactggcaaggccggaagataagtcttggaaagtttgctaaattaatattcttcctgatctatctgcatagcaaatgtttctaagctataattagagtagctatttgcagatagattagggagaatttttttatgactgaaatatggtgtgtggaagacgacgaaagcattcgcaaaatcgaaatgtatacgctggagtcgatgaactttaaggtgcgtggctttgaagacgggacgacttttgtcaaggccctggcggaaaagcatccagatctggtcatcttggacctgatgctgccagatgaagatgggagcgatattttgaaaaagctccgtggcaactcgtcaactgaagaattgccggtgatcatcgctagtgctaagacagccgaatatgacaaggtgaagaacctggattctggggctgacgattacttgaccaagccttttggcatgatggaaatggtctcccgggtcaaggcggtcctgcgccggaccaaccacaagaaagaagacaagatcgagaaagacgggatcaagatcctgctcaagcggcatgaggtttatgtcgatggtcaggaaatcgagctgaccttgaaagagtacggcctcttgaagctcttgatcacccatccagggaccgttttttcccgagaagaaattatggatcaaatttgggaaacgggcttttacggtgaaacgcgcacggtggacgttcacgtaagaaccttgagacaaacattgagtgaggctggtagccatatcgaaacggtgcgcggggtcggttatcgctaccatgaagggaattaatgtttaaaaaaatatttcgggcagtctttttatcaacggcagtcatgctggtctgctcggtggttttgagtgcgctttttttaggcatcgactatgatcacaatgaggtcaacaccttggcttcgcaggccgatttggcagccagcggggtcaacaatgggggaaggaagtacttaacccagctaaaaggagaaaattaccagattacctggatcaatgctaaaggcaaggtactctacgacaacgaggaaaacccagccaagatgggcaaccacgctaagcgcaaagaagttgctgaagccatgaaaaagggcgaagggcaaagcgagcgctacagcacgaccctgtcgacggttacgatgtactatgccaaaaagctgaaagacggcggcgttattcgggtggcggttacgcggaattcgatctggatgaccatcttgcaattgctgacgctgatgctgatcatcttgctgatcgccgtgattgcttcttggttcgtagctaagatgatctcgcagtccatcgtcaagccgctgaaccagttagacctggaccagccgcttgaaagcaagagctatgaagaaatcaagccgctgttaacccggcttgacagtcaaaacaagcagattgctgaccaaatggagcagctccaccagcgggagaaggagttcaagacggtcaccgatgccatgcaagaaggcctgatcttgatagacctgaacgaccaggtcctcttgtccaatccggcggtagtatcgctcttaggatcaaagtcttctgaagttttgccagatgatgttaaaaagatcatcgatcaagacaagcggaccgtccacaccgaagggatcgtggaaagagaagggcgcaacattcaaattagtgccagtccgattttttcacggaaggtcttaaaagggacttcgatcttggtcgttgacgtcacagaagaataccatgaagagcaggtccggcgcgaattcacggccaatgtgtcccatgaattgaagacgccgctgcagtccatcatggggtcagcggagcttttggaaaacaacctggtcaaggaagacgatcggccagccttttaccggaagatccatgaatcttcagctcagctcttgaccttgatcgaggacattatccggctgtctcacctggacgaaaatccggaatttgaagaggtccggatgaacctgaagagtccggtgaccgaggcgatcgaagccttgcaggcgtcagctgacaagcacgagattgagctgaaggcggctttggccgatacagaaatcaaggccaacttccgcttggtttatgaaattgcctacaacctgatcgacaacgccattcgctacaacaatcctggcggccaggtcaagattgcggtcaaggaagtgcgggggcaagctattttgcgggtttctgacacggggatcgggattccgcttgaagcgcaaaaccgcatctttgaacggttctaccgagtcgacaagtcccacaaccgcaagactggcgggacgggacttggtctgtccatcgtcaagcacgcagtacagcagtgccatgggacgatccgccttgaaagtgaactgggcaagggctcaacctttaccgtggtcttcccagctttaaagcatgaagacaaattatacagccaaaattgcttatttgatctatgataaaggtgtcgaaagaaaataagagctctatttaaataacatagacataatcatgggctaagtgtatataaagtgtaatttagaactatacaatatatacgtaaaatcttatgattaaaggtgaacagatattatagccacttttttaggattcgattaatgtaaaaattacacaatgaattaataaaaagcgccatataataagcaaaaaaagtcatttaaataactaaaataaactgagacctaaaagttgagactgtaaaatagtttgtgtaaggatgaatgattccttaaatttatttctttaaacattagaaaaaggagttcctttctcgtatgattggtttgaacaaaaaaaacacatacagaaagaagaactccttcatgaatgattttaccaaagattttgctcaagctctattcaatccagacaaaataaatgatttattgcgcaaagaactacaacaggctgttaataacttgctagaagctgaattgactgcctttctgggctatgatccctatgccagaaatggctggaatactggcaactctagaaatggtgcttatttccgcaaagttgatacgcaatttggcccaattgaagtgcaagtgcctcgggatcgcaacggtcaatttcatcagcacacgctgcctgactacaagcagcactcggatatcttggaaagcatgattatcaagctttactccaagggcgtgaccaccagggaaatagccgatctaattgaaaagatgtatggcagccattacagtccagctcaggtatcaaatatttccaagcagatgattccaaaggttgaggcttaccacaaacgcaagctaagcgacaagtttttctgcgtctatttggatgcgacataccttcctttgcgccgagaaacgtttgagcgtgaagcagtctatattgccattggcattaaacctaatggacataaggaagtcattgactactgcattgctcctagtgagaacattgaagtctggacagatatgcttcaaaacatgaaatcccgaggcttaaagcaagttgagctttttctttctgatggtgttgttggcatgaaaacagccttgaccaggacttatcctaaagctcattttcaacgctgtttggttcatgtcatgcgcaatatctgcgctaaagtacgcgtcgacgatcgtgaaaagatcatgaacgaattcaaacaggtgcatcaacagacaaacaaagaagaagccacagctgtcctgcatgacttctataccaaatggggcaaggtttacagccatgttatcagaagcttgaaagacatagaaccagatctgctggtcttttataactatcccaagcagatcagagcttcaatttattcgactaacatgattgaatcatttaacaatgtgatcaagcgcaaagctaagcctaaggcagagtttccaactgaacagtcgcttgatgcttttattggtattcaggcaatgagctacaatgaccgttatttcaatcgaattcataaaggctttggtcaggttcaggacaccttagaatcctactttgattaaataaataattaaaaaatcaatttacgagaaagaactatttacacaaaagatttgacagtttctaaaagttagacacttttaggtctttttctacgtaaagtcaagcataataagaagtttggcttcattttttgtttaaatttcaacttaaacatcttttagtgtcgatttatttttttagttagacacgacaaataagcccagatccatatctgatttttgggcttagcgttataatgtacttgatcaattaattacgactaaagtctttttgattatgtgtggctacgttgtaatcatatggttgatcattgataatcagggcataaatggttctgattagtttatgaattgaagcaatagctatctttttgaaccctttggtttgagaggatagctttttgctttcataataatctgctatatgacacggatttgtcttagctgcattatcaatttgtccaatagctcgataaagcaacttacgtgcgactgcattgccatgtttagtaatacttaaattagagtccatttctcctgactgatatctgcctggatcaattccgataaaagcattgattttattaggattactaaatctgcgtaaatctcctaactctgctaaaactctgacagcagtggtctgtgcaaagcctggaatgctttctaggttttctaaatcatgattaggcaaagacttcgctaacttaaccattcttgcgattaaattttctctttgatcacttaaattaagcaatctgtgtgcataatactgcacttgctcgacttctatgctagagcaagatacaactggataagcttgataagctaattcaattaatttatctgcagtccttagagcgtgtttaaaagcaatcccctttaagctcattaaccagttaataagctgttttttatcttctcttcttactaagtcacaatgaggatatcgcacaactatttgccagtaatttttacctttagcagaagaaaataaattttcaatttcaggaaaagtcgattgtagagcttggtgaagtcgatttttagctattaccaagtcacttgtcagctggtcatagaagcggctcaaagcattaagctgcttataagtttgggattcgctttgattaaccggatggcgataaagtctttgaattaaagctaaatgataagcatcagttttatcggtcttgttgtagcgtagccccatattcatctcttttttggctttaagcggattaataacaacatattcatagccgtagtcttcaagaaaagcctgcagtctgcgtgaataaacaccggtagcttcaaaaataatttgcggatgtttagaaaaagcggttaattcatgaagcaattgaataaaaccaggacgattattagtaatggttagttcatttttgctttcaccaattagttcacaaacagtagaagtagacttgcttacatcaattccaaaagtaacttgcataataaaaacctccaaaacttagtagtaaaacgtatttacttaagaaatcagatctaattttctaaactcgacatctagtgtccacattcttcgaagagactattgaaaacttaagtaaaactgccagtttattatgcgacatcaagtgtctaaagacctcagggcatatcgttttaccactactttaattctacaaaagaataaaaatagtgaatcaattatcccgtcggataactaattcactatttagcttagaatgtttactatgtctaaatttaataaagaacaaaaaatagaaatttatcataaatggaaagatgaaaatatctcaatcagtcaattggctaaagcgtacagaatgaatctagctaatttagactatatgcttagattaattgatatgcatggaatagaaattttaactactaaaaaccaaagctattccaaagagtttaagcagcgaactattgaacaagcaatctttggcaataaaccatacttacagctgtctttggaactggggtttaaaagtattggcatgcttaacaattggattagagaatataagaaaaacgggtataatgtcattatcaaacagaaaggacgccctgcccgtgaccaaagaaaagcagaaatctcgcaagaaactggagaaagagatccagcagctgaaagaagaaaacttgcgattgcgtattgtgaacgaatacgtaaaaaaactaagtgccttggaccaagaagatcagaagaaatagctagggtgattacggatctaaggcaagaattcaaagttagtttaaattatgtattagctgcgattgcagagcaccctgagctacctataattgccagaagctcatactacaagattatcaaacgacagcccgccaagcctaaacggtcaaagcttattgctagaatccatgagatttttaatcatcatcaaggccgctatggatatcgcagagtagctttgcagttaatcagagagggctggaaagttacggagaaaaccgttcgctattggatgcataaattaggtcttaaaggcatcaggcgcaataagcgcaaatattcaagctataaaggtactattggcaaaatagctccaaatttaattcatcgtgatttcttcgcagccctgcctaacacaaaatggtatactgatatcactgaatttcatcttaataatgaaaagctttacttatcgcctattctagacggctgcggtggcgatatagtttcttatactatctccaaacatccagatatggatttagtaatgacaatgcttgacaaggcttttgccaaagaaacagctcttaataactgcatttttcatactgatcagggctgtcagtatcaaagccctcgttatcagcgagctttaaaactccatggtattactcaaagcatgtccagaaagggcaactccatggatgatgggctaatggagaacttctttggcctgctcaaaactgaaatgttctatgatcaagaatacaagtatcataatcttcaagaattaactcaagcaatcgaggaatatatcgaatactataacaacgaaaggataaagagcagattaaaaggcttaaccccgaaagagtatcgaagtcaagcctctattaatccaatattttaattgtctactttttacgtctcagtacaaaaattatagagccggttttttagtactgttttaattctatcatgattgtagtaatgaatgtattccttgattgcttgttctaattcacccatggttttgaatgtcttttcaaagccatagaacatttttcgtttaagaatgccaaagaagccctccattaagccatcatctaatgaatttcctttacgtgacatagactgggaaacaccatgatttttaagccaagcttggaaaacagcgtgctgatattgccagccctgatcagtatgaaaaattaacccattgagtgcaggatgcttttgataagcttgatccagcatgtccattacttgttttagtaccggatgacgatttaatgtataagcaacaatctcttgcgtacatccatccataataggcgacagataaagcttctctccattaaggtgaaattcagtaatatctgagtaccaatgtctatcaggaataattgctttaaaatttcgtttaattaaattgggcttgatttttccaacagtccctttgtagcttgaatatttaaatctgcgtctaattgcaatggcatatagatgcatcttggtcattaatcgtttaacacgtttatgattaactataatgccttcacgtcgcaattgggcagtaattctacgatagccatatctatgcttgtgctcctcaaatatttctttgatccgttccataatcttttcgttttttaaatctttatcatctttagttaaagtgtagtaataattactgcgtgataaatgcggaagatcaggattggagttaatcgtatcaagcacaaacttaacggttacgtggagttcttgccttagttgcgtaaccgcagaaactatctcttgtgctgttggttttcggttcttggggagactaaggcgctcaatttttttacaaattcgttctcgacagtaagtcttaagttcttctgtttgaggtcttttatttgcttctgaagctcttgaatctgtttgtctttgtccttcatgggtaggtctgcctttcttgtgattaatgacattatacccgtcttctttatatttgcgaatccaattgtgaagcataccttggctgggcagtcctaaatccaatgatacctgacgagccgtttcatgatcataaataactcttttgatggctttctctttaaattcaactgagtaatctttatagctattatcaagaatttctatcccatgacgttctattaaggcaatcagataaaacaaatttgtacgatttaccccatattccttagcagctaggttagctgatatattataatttttccaattattgtaaatatcaattttgtcttgtttggataatttagtcataataaaaacctcgaaattcttgtccgaatttcggggttcatatcatttgtttctgtagtgccttttttataaatatcaataaattttaggagtgtaataagattttagaattaattatgttcaactgctgttaacgtaatgactccaattaattcaagtgccaaaaatgtaattccaaggatagtaatcatagtgcccatctccttatctaggagataaataattagaatatttatcttttaattcaatcattgcttacactgttactgtaccacataattgcgtattatgaaagcgattacattaaattgggagaaaaaagttgacctccgaagaaatcaacttgtgcccctgccaaggacctatattatagcattcatttattctgcatgatcatcctttttctcagttgagtcaggattttgatcgtcagacttggtgaagtcaccattcatggtattaggacgaccagtttgataatcaactgtgtgcttttcagccttaggtgcgctttgaccaggttcaggcataaccatagcagcaataatatataaggcaacgccaggaaatacacctgtgaataatatcaatgcagcaccgatgattctaacccaagcaggatctagatcaaagtagttagcaataccgcccaaaacgccagctaaaattttattttgtgattttgtaagtcttttttgcatgataatcaactcgtttctaactgttctatctcttttacatatattatacagcaaaggcatgaaaaaagtgttgattgctcaacacttacacataattatgatgcccgctaaaagattcgaactttcactcagtcacctgaacagcgacctgaacgctgcgcgtctgccaattccgccaagcgggcaattttctttggtacatgaataatcataccaaatatttggtaaaatgtaagcataaaatactttaattataaaaaaggatggaaattcatgttttttagcaaaaaaataaaacgtgcagcaattaccacgattgctgcagtatcaattttttcttgtggtgcggtatttgcaactataccagttagcgcagatacaactagtagctatcaagctgatcaagttaaactaaatgtaaagtcagcaattgcaattgatagtgattcaggtcaaattttgtatgccaaaaatgcgactaaaactttgccaattgcttcgatgactaaattagtaacagtttatttaactctgcaagcaataaaaaatcataagctttcatgggatcagaaagtaaagccaacggctccgatagtaaaggtagctaataatgcagaatattcgaatgtaccattaaaactaggacattcgtatacgataagacaactttatcaagcaaccttaattgaatcagctaatggtgctgctatgctgcttggtcaaacaattgctggctcacaaaaggcatttatcgatcaaatgcgagctcaagtaaaaaagtgggggattgaagatgccaagatttatactgcttgtggtttacctaatggcaatttaggtaaagatgcatatcctggtgtaaataaaaatgctgaaaatacgatgtcagctaaggatatggctattgtcggtcaaaaattaatctcggcattcccagaagtattagaaactacacgcttagctcacttaaactttaaagatgctggtcacgtaactaagatggctaactttaactggatgttaaaggggctttctcaatatgatcaagcttatccagttgatggcttaaagacggggactactgatgctgcaggggcttgttttatcggaactgtacaacacaatggtgctcgtttactgactgtagtaatgggcgcacgtcaccgtgacggaacggatccagctagatttgaacaaactaaaaagttaatgaattatgtttttaccaagtatcgtcctgtaacaatgactgctggtagccaaatgaatggcgctaagacaattaaagttgttgatggtgataatgcaactactaatttaggacttaagcaaaagactactatctgggatccagctgatggcaaaactttagtggcatcattgaataaaaaatctgtagaagcaccaattaagaaagatcaaacagttggtgattatcaatttaaatctggtaatgaaaagattgtttcattgtctaatcctaatgggatgaacgtcaaggctaaggcattgtcagctaataacaaggtgaacttttttgtcagaatttggcgctggattttcggaggaagataaatatgactgaaatttctgaagatatcttgaaaaaggtaattaaagaaagagaaagcgatacacataaaggcgattacggtcgtgtactcttgatcggtggtagtgagaactatggtggcgctattattatgtctaccgaaggcgctattaatgctggcacaggtttgactgctgttgcaacacaccctttgaatttagcaccgttacatgcacgagtgcctgaagcaatgtttatcaactggcgcgatgctaagttagcagatttaatcaaaaatatggatgttgtagtttgcgggccaggattaggcatgagtgatctcgctaagcaaattttagttatcttgcgaagatgtacttcagaaaaacaaaccgttgtcttagatgccagtgctcttgatttaattagtcaggataagaacttattgccaactaatgctggccacttaatcttgacgccgcatcaaatggaatggcaacgattgagtcaaattcgtattccgtttcaaacagatagtgccagtattgatgctttaaaccaattgattccagatactaatgcgcttttagtactcaaatcgaatcatactcatgtttataatgggactggtcaaatttttgttaatccaattggcaatccaggcatggccactggtggaatgggtgatactttagcaggaatcatcggtgggatggttgctcaatttggcccaggcgttgaaaccgttcaagctgctgtctatcttcattctttagcaggtgacttgcttgccaaagataattatgtggtacgaccaacggaactttctaaagtattgcctaaattgatgaaaaagtattcagaattggcataaacatgttaaaattctaatagtaaataaatgcatccctagttgagggatgttttttaacgcttcaaagacgaaaaagcataatataattgagttaaatattaataaaaaagaagattaacatatttatgaaaaaaaacattattatcggcgtaactagtatcgttctagcttttggtgcaattatcggcttagctaaggtatgcgcacctaagtctgatgtctcacaagaagctgctacaacgcagactaaggccaaaactaagaaaataaataaaactaagaaaaaacaaactaaaaaagtagataatggtgctttatatcgaccatatagcgatcctaaggacttgcgcaaggcaggcacttggaagaaaaagagtgagcctaaaaaatatcctaagattaagccatatgaaaaggatttgactttgcgggtatcattaaaaggaaaccggacctatttgttaagaaaaggcaaggttttgtataccatgttatcaactggtggaatctacaagaagggcaagtcattgaccccaactggaacttttaggatccaaaatggtcgtggagacagctttttcaattataacttaggtgaaggagctaataattggactagttggagtcctgataacgtgtacttgttccactctgtgccaactaaagctgattatagctataacttaaaagaagcagtcaaattgggaagaactcaaggttcacatggttgtatccgtttgagtgtacctgattctaagtggattatggatcacatcccagatggtacgaaggtaatcattaaaaataattaacaagaacgttgctttttaagcaacgttttttaaaaaattgcagtaaaaaactttgttcaaagcgttcaagattttaatccaactcaagaatggtttttttaaccaaattagtggcagaagccgttttttcctgctataatcatgtttgccaagaagtcaaaagtagtagttattttctttttaagcgagtctatgttggtgcaagatagatactagaagataatgaaggcgtgtttgactgataaaatcaagaatttaaataagcggatactttgtatcaatctgagtggtaccgcgggtttttaactcgtctctttctacatttgtagaaggagacttttttatttagaagagaggaataagatggactttaagaatgaagtagttgacttggttgctagtcaagttgatttacctaaagaaaaaattgctgcattaattgaacgccctaaaaatgctaagatgggagactatgctttcccagcatttattttggctaagactttgcacaaaaatcctgcagaaattgctaaaaatattgcggataacttatcaagtgataatttcgctaatatccaagcagtcggtccttacgttaactttgcgattgaccatgaaaaattagtttcatcgactttgaaggatgttttgactgaaaaagaacattacggtgatcaaaagattggtgaaggaaatgtgccaattgatatgtctagtcctaacattgctaagccaatgtcaatgggccaccttcgttcaactgtaattggtaattcaattgctaagacaatggagaaggttggctatactcctgttaaaatcaattacttaggtgactatggtactcaatttggtaagttgattgctgcctacaagcactggggtaatgaagaagacgttaaaaaagatccgattatgaatcttttccactactatgtaaagttccaccaagaagctgagaaaaatcccgaacttgataatgaaggtcgtgaatggttcaagaaacttgaagacggggatccagaagcagttaaactatggaaatggttccgtgaggtttcattaaaagacttcaagcgaatttataaagaactaggcgtaacttttgattcatacaatggtgaagctttctttaacgataagatgcaaccagtaattgatgaattaaaagaaaaaggtcttcttcatgaatcacgtggtgcgcaagttgttgacatgggtgaaggtgaaaatcctgctattatcgttaaatctgatggtacttcaatttacttaactcgtgacctcgccgctgctgaatggagaatgaaagaatataacttcgttaagatgctttatgttgtaggtaacgagcaagcccaacactttgttgaattgaagactgttttgaaaaagatgggttatgactgggctgatgaaattcaccacgtaccatttggtttaatcacccaaggtggtaaaaagttatctactagaaaaggtaacgttgtcttcctcgatcaagtattaaaggatgctgtttcacttgctaaaaaacaaattcaagaaaagaatccagatttagcagatcaagatcaagttgctcatgatgttggtgttggtgccgttgtcttccacgatttgaagaatgatcgtttagacaattttgactttgacctagaagaagttgtgcgttttgaaggcgatactggtccttatgttcaatacactaatgctcgggcacaaagcgtcttacgtaaggctgctgcgatgggtgaaaatcctagcgaaactgatctagctcttgatgatgactgggcttttgccgtagccaaagatttagcagatttcccaagaattgtagctagaagtgccgaaaagtttgaaccttcagtaatagctaagtttgccttagatttagctaaaaaattcaataagtactatgctaatgtgaagattttaaccaaggacgataaaattggtgctcgtctcgccttagttcaagcaacatcaatcgttttaacggaatcacttagattgttaggtgtcaatgctcctaaagaaatgtaagagaaaaacaatgaaaataagaaaataacgcttacattctgtgaaaaattgttcatatttcaattattagggtacaataggcatgtaagatatttaggaggtattttttaatggcttattttgacaacggtaatcaaatctttaaagatgctcgtaagaaccattacgctgtaggtgcttacaacactaacaacttggaatggactcgtgcagaattacgtgctgctgaagaaactagaactccattgttgatccaagtatcaactggtgctgctaagtacatgggtggttacaagttcgttaaggacatggtagctgaccaaatggattcaatgaacatctcagttccagttatcttaaacttggaccacggtgactttgaatcagctaaggaatgtatcgctcttggttactcatcagttatgtttgatggtcacaagcttgatactgaagaaaacttagctaagactaaggaaatcatcaagttggctcacgaacgtggtatttcagttgaagctgaaattggtaagatcggtgaaaaccaaggtgctgatggtggtgaattagcatcagttgaagacgctaagagattcgttgctgctggtgttgacaagcttgcttgtggtattggtaacatccacggtgtttacccagaaggctggaagggcttgaactttgaccgtcttaaggaaattgctgaagcagttccaaatgaaccacttgtacttcacggtggttcaggtattcctgaagaccaagttaagaaggctatccaacttggtattgctaaggttaacattaacactgaattccaattggcattccaaaaggctactcgtgaatacatcgaagctggcaaggacttagacaagggtaacaagggttacgacccacgtaagttattgcttccaggtactgaagctattaccgatgctatgaaggaaatgatcggttggttaggtactaagactatcgatgacgaacttaaggatgcttcattcgaccgttcatcattaaacgaagaataatcatttgataattatttaaataaagtctagcgtttgctaggctttatttttttaggcaaatttggtgataacttaattgaacttattataaaagaaatataaaataaaaaattgaattataaagaaagtataaaaagagacttttatggaagcaaaaatgttaaatccatttatgcctaactttggtcgttttcctaaaattattatcgatcagcaagaagctttaactgattatttaactgggttgcaaacacatgatgctaagtatcaaacttctttagtttatgtcacaagaggatcaagaaaaacagttttccttttaaatgttcaaagatctttagaagagttagataattggatatttattcgtttaaataatggtcaaggagatttgctttttcaattaatgcatggtttgcaacgagttgcaggtatttcgttagttgacttgttaaaaagtgttaaaagtttgaatattatgggaaagggaattactgggcaagcactacaagaatcacagcaaattgattatgatgagtatatttcaattttgctaagtcgtttaaaaaagcagggtaagtcaattctaatcggaatagatgaaattgaaattagtgacgatgttcgggcttttggctcagaatatcaaacattgattggtgatgaataagatatttcattattgatgacaggattgccaagcagaatatccgaagtacagaatgaataataccctcacgtttttactatgtagtaatcgtgtttatttatcaccgttggatgaaaaaacaatagctaatagctatgagaaagcatttactaaaggaaaacgtgaaattgatttcatggtattggatgaaatgagccgtgcagttaaaggctatgcttatgcctttcaaacgattggttattatgcttggcgatttagtcgggaattattgcagttaaacgaagaagttttgaaacaaacaattcgagctgcaaaaaaaggacctttttaggaatgcctatgaaagaatgtatatggatctttccaaaactgatcgcgattttatcgaagcaataatcaaagctggaaccgatcgtgtcacgacaaaacaattgcaagatatcttaaacaagcctattaattacatttcggtctatcgtgcaaggctgttagatgatcaattgattacatcccctcaaagaggagtagtacaattggcgttgccattttttgcagagtttgttgaaaaatctaatttagaacatttatcttagaaaatgagcaaatataataaattatggcaatatatcaaagataataaggctggggactttgagctttcttttgatgagcttggccagcaggctggggttgccttagatcattcctttttgcgttataaaaaagaattaccagcttatggctttgaggtgcaaaaaatttcattgaagaataaagtggtgaagtttcatcagttgtaatgaaagctattaataactaaagtagtagtttgcgataatatcttcaaaattagtaactatgttttgttttagaaaaagactaagatgtaagtaaaaaatgggaggattaataagttactatgaagaaggttttatcttggccagtatattatcaactatcagagatttatacggcgccattaaatgtaatttggtttgtctttggcgcggcaatgtcgtttcaacaatatcacatgtttaatttgattaacattttactgtgcttagtagatgtttttctgtttgatttagcagttaatattgctgataattactatgattatcttcatggcaaagatcgacattttttgactgatataaatccaattggtcgtctgaagttacctttaactgatgttagaaacttagtgtggattagttactttatttcggcgattccgggtattattttggtttatcgcaccggctggccagtactaataatgggagttgtaggatatttcattggaatattttacactgcgggtcctaagccactgaatgcaacaccgatctgtgaattagtggtatctttttttatttcgtatttcattatgctagtaagcatctatgtcacaatttacggcacttatcctttgacctggaacttagcattaactactctgataagatgtttgcctttaacactcattttctatgctttgcagttagctaataatacttgtgatttgcatgaagatttaaacaatgggcgccatactttagccagttatactggtaaaaaatatgctcttaaaataattaagacgttgattattgcgggattattatttccaattatcgttgttctttttggtttagcaaaatggccattgatctttagttgttttttgttgccaatattatggccaaaattaaaacaattttttgagcatccggataaacaaactacctatttacaaatgattaagtatttatcaacgcgtggtgctagttaaatcgttctagacaataagccaaattataagctaaaattgcaatttccaaccggctttgaaagcctatcagactacgtgctcgattgttctcggcattgtaataggtcagaagcgaaaagtcgctttcaattgttctgcgaatagccatcaattgatgatcattgtgctttttagctcctgtcatatttttacgatatggtgtccaaagttcataacccatttgttttagctgttgatgcagttctttgcctaaatagccttcgtcgccaagaagatagtaattagatggatgggtattttccagcagttcaactgtctccctggcatcatgaactgatgcttttgttacgacataatcaagaatgtaaccgtcatcgctaacaatgacatgaactttgaaaccatagaagtaaattttcttggtggccttataaccaatgttggcataaccgcgaaaaattttagcacgatagttgcgaattggttggcaaacaggtaccggaaagctgtcaatgatcaagaaatgtccattcaggtcaacctttttattcatttcttgccgtatctgataaatcaattgcaatagctgacgtgaacgtcgattaaaacgtgagtgtgataaacaattgaaacattcacagaatcttctttgtgattcaattcctgtcttagcttgccagataagtaaagccaaaatcagactgtctgtagttttaatttgatcaatatttcgccgatgagtaaactcagccggtgcatacaaacgataccagtgccgacaaattatcactaaatctttaaaactaacttgtaaatggtggctaaaacgcttaagcttaaggcagttcaatcagatcagactcttttctattattactatttacaagtcgagtctaacaagattggacttttttattaactaaaacgatttaactagcaccacgcgtatttatcaatatttttcattacatatatagctatttatacagtttgggttttagtttagaggaaaattatggctttgaatatcatagatagaggattacactcattgataatgaggggggaaaataattatgtttggcaaaaagaaggataagaattcagaattttcaccagatattatgactttaaaaaatgcacttgaggaagtacgttttacgcccgaagttgagcatgacgcagaattaattaacatgtttgacgaagcaattgataaagccgagaagggtgaatctgttcaaacaatttatggtcgactcagttatcaaattacgcaatatattcaaacacatcatttcaaggcacccaagccagtaactgaattcttacatggaagtactggaagcgtagccacgggattgacttcagttccagtttcttggaatacagtacattaggaattttttatgtgcataaaattgacaaatactgaaaaataattgattaattaaacagagtagcaggtaatactactctgtctttttattgcaaatatgatgtcaaatgcgaaactgtaaaatagtttgtgtaaggatgaatatttccttaattttattttcctgaatattagaaaaaggaatccttttcccgtatgattgatttgaacgaaaaacatactagaaaagagattccttcatgaatgattttaccaaagatatggctaatgctctattcaatcaggataaaattaatgatttatttagacaaaagctccaacaggctgtcaatgacctgcttgaatccgaattgactgcctttttaggctacaatccttatgagcgcgatggctggaataccggaaattctagaaatggtgcttattaccgcaaggttgatacgcaattcggacaaatagaaatcaaagttcctagagacagaaacgttgagtttcatcaacacactatgccagattataaaaggcatactgatgttttagagcaaactgttatcaagctctattccaagggcgtcacaacccgagaaatcgctgatttgattgagaaaatgtatggcggctattattctccagctatggtttccaatatttctaaagaaatgattcccaaagttgaggcatatcatcagcgacatctgtcagataagttcttctgcgtttatctcgatgccacctatattcctcttaagcgggtcactcatgagcgcgaagcagtttatatcgccatcggtatcaaacctaatggtcataaagaagtgattgactactgtattgcgcctactgaaaatattgagatttggagcgaaatgctcaaaggcttcaagagtcgcggccttgaacaggtagagctcttcttgtctgacggagtagttggcatgaaagaggctatctgccagtcctatcctaaagcgcattttcaacgctgcttggtacacgtcatgcgtaatatcagtgccaaaatgcgggttgacgatcgaaaaaaagcactggatgaattcaagcagattcatactcagtcaaacaaagaaatggctgtacaggtgctgcatgaattctatcaaaactgggaaaaagcctacaaaaacgtagttagagatcttagacaggttgagcctgatctgttaaccttttacaactatccgccagctattagagcttcaatttactcaactaacatgattgaatcctttaacaacaggcttaagcggaaaaccaagcctaaaacagaatttccaactgagcagtcgcttgacacctttattggagttcaggcaatggattacaatgaccgttactttaacaggattcataaaggatttgggcaagttcgagacaccctagaatcctattttgattaaaagataaataaaaaagtcaatcaacgagagagattatttacacaaacttcttgacagtctccaggattgcattactatagtttatgtaagttatgaataggtagtaagtaacttatgaatttcaagatattcattgatttaatgaggagaacgaaaatgaaaattttcaacaagaaaaacttattattgtcatctgcagttgttgcagggatgctattcacagttggtactaaggctgttcaagctgatacaaccgatagttcacaacaagcaactacaaatactttaaaggtaaatgcaaatactgcagttccagataagaatttgattacgccagtagctagccgtgataatcaaactcttcgtcaagttgcagaagcaaacaacacttcattaagtgtattggaaaagttgaatgataatattgatccagataaaaccattgctaatggcacgccattatatcttccacaaaatgaagatttgtcaggactatttggtatatatcttagatcagatacttcagttccaagctcattaaagagaaaatattatgatagtctttcagcaaaagagagagctgctaagatgtggattattgcacgtgaatctggtggaaattacaatgcaagaaatggtatctatattgggcgttttcaattaacaaatacttatttaaacggaaattatagcaaagcaaatcaagaaaaaacagccttacgatatgttaagggacgttatggttcatggtcggcggctaaaagattttggcaggctcacaactggtattaataaataaaaggaaagtggaaaaattgaaatttcaaaaattagtaactagtgtattattagtagctagtaccactggtgtattaatgactgcacctaaacgggttcaagctgtagctgataccaatactactgagagtggaaaacccgtcgcaaatattgttaataagcctaacctaacaaaacaaggttatgtgttaactattcaagccccatcagggaagatttatgtagggcaaaagaattacaagaaacaattaactactactaagccaatatctaacgcaaaatcagttagttggaagaaaattaaaaacgttagatttagaattgaaaaagttgcttatgcgacaaaggttataaaatttggtggagcaccacagtatctgcttgtctctaaagataaaaaatatagttgctggacaacgcgttattctattaaatactatttttggaatactaaaaagatgcaacaagtaattaagccattgtctaaattgacaactagaaactcttcaagcctaaagaagattcggaataagcaagattttaatcaagctgtattagctgctaaaagattacctgctaatcaaagaaaagttgtcttagaatctttgaatcaagtgaaaaaagttggcaatattgataaggctgaagataatattttgttgttcagcttttagtgatatttctagcacagatttaaaattaatataaaactgaagttagaagaatttatttaatgttgagggggaagaaattgtgagaagtatatctaaaggcattgtatctttgatagcagctacaatgttattagcagcaggggaagggatagttcctaatactgttaatgcttctatgctagattcggctaaaagtagccagaatagtcaagaaagtagtagatacacttggcagagtgttaagctaacagatggaactgaaatgcaaattcttccagataattcttcaaaattagctggaaagattaaatataacggtcaaatatattcatatcgcattgtttcaaataatggtgtatatactatttatttgaataatgaggaagtatattcagttgatataaataatagccagttacctacgacaagtgtaggtggttttgatccatttattaattttacgtacgcaaatggtaaggtagcatttaaacatgcaggtagaaagtattattatttgacgacagagaaatatagtgcagatacggtaagaagactgaaaggaactactaaggatattattattggtttgcttggatttgttcctgtagttggcccctatgtttctgccggcggttttgcctatactgtttataatgatatttttggaaagaatcctaaaaataaatggtatacgataaaagaatattgcactagagggtatgaatattatgcttggaagacctatacttatactgactctcatagaaaacatctacaatctgttaaatgggagtataaaaaagtattatgagaggaattttaactagtagagttgctagaggcatattagcgtttatatttatattttttacgggttggtctgctgcaagattaatagtacagatagaacgttctgaatcgatatatgactaccttattttgggaggatttagtctagttttaggtattttggaactctatagattaataaatagtaagtaacctgaaaattttagaaaattgaacgttaacgtgaatatcaatataacacgcttagcttaaatagtcttattagtttttataattcagtaagataatcggcaaattggtaatatttagttgtagtcgcttcaaaggataaaaagtattcaacttggattactcaagctttcttgcaatactactacctaaacagcaagtctatgcaaggtgtgattaagccactcaagcgaattgctaatagattaaataccagtctgaagaaggcaaacaacaaacgtgactttaacgctgcaatgaaagctgctaagaagttacgtggcagtcaaagagattttgttttacgttcattgaatcaacttaagaaggatggctccatgaatgtagaaggaaagaacttgttattgtttggcttataaaattaagatattaagtagtaaagctcagcagaattgcttgagctttatttttttgtgaacggcagtcgacaaacagtataatgaacttatatcaaaagcactgaagttatttagaaaagaagatggaaaatggctaaaaaagttacgccacgcttggtattagcgattttgtcggcagggatgctctcatttttaggaatattggatgaaacggccacgacagttacttttccaacgttaattaaagaattttcgattactactgatcaagttcaatgggtaaacacactagtcttattggtaattgcgaccattgtgccaattagctcacagattagattaagaatttcgactaagaaaatttttattctaggagttcttttgtttactttggggctaatcatcgatattttatcaccgcgctttgatttattgttattaggacgggcaatgcaaggagtcggcacggggattggcttaccgttaatgtacaatattatcttggctgaagtacctaaagaaaaactaggctttatgatgggaatcggcactatgattactgcctgtgccgttgccttagggccagtttttggcggaatgattaccgatgcacttaattggcgctggatcttcattatttcgctatttttaatgaaaaacgcccggaaattccccgtattttaatgcggggatggatagggccaagctgacctaatggtcagctttttttattaaaaaatgaagacatatgttcgactttcctgtaaaatataaatatctaatctacagaaggaggtgaaacacatgaagagaatgagcagtttagcctaccattttggcttgaaagtacgcttttatcctagttctaaacaaaagaaaatcatcaagctaaattatgatgctcagcgttttgtctacaactcttatgtaggacgtaatcggaacaattatcgggctaagggctacttagctgttagacaatatcaagtaatgccttttgccttttctgttcttaataattatgagactaagctagcagaagaagtagtcgccaataatgagttattggctaagccaaagaacattcgcgatgcctatagctttttacgcgttaaagaaattgacagtctcgctattgccaatgcgattcaaaactatcagaaagcttggaacaactatcgcaagcttggtcatggaattccgacttttcacaaaaaacgtagtgattggtcatatcagaccaactgtcagtatcctaaacagacagaagcctttcttgataacgggacagctagatttattgatgctaagcacgttaaattgcctaagctaggcgttgtccgcattgccagctttagaaaattgattaaagagcgtttgcttaatcatatcccaactagaattggcacagtcacgattaaaaagaccgctgacgaccagttttacttatcaatgcaactaggcagcgatattgcctttgttaaggaattgcctaagacgcagagtcaaattggcatcgacctcaatcttgataatttcttaacagcatctaacggagcaatggtggctaatccacgattttatcgcaaaaccaaaaagaagcttgcccatgcccaacgtgtcttgtctcgcaggcagcgcagagctaagaaagagggacgcaatttgcgcttagccaagaattatcaaaaacagcgtctagcagtcgctaaactgcacgataagattcgcagacagcgaaatgacttcttgcaagtactctcaactgcactaatcaaaaaccacgatttagtagttgccgaggaattaagaagcaagaacctgttaaagaatcatgccttgtctcaagctatttctgatgttggctggcgcagttttctgaacatgctggcatataaggcagacctatatggcaaagagttcaaaacaattgatcctaagtacaccacccaaagatgccatcaatgtggcagtattatgggacaaaacggttataagaaattaacgcttaaggatcgagaatggacttgtccaatctgtcaaacgcatcatatccgtgattggaatgcggcagtaaacatcttagaaaaaggcttaggcaactggcagaattctaaaataaaaaaagcagcctaagctaggctgcagtccgctcgcaactcgcggactcaaaaggctttggtaattagacgacctctatcggcaatagtcaaaagattattgttggtaagtcaagtccgtatctaagcaagttggtgttctggttagcgcaagctaacgagccagccaccaagccccagaatttattctggggtagttgacttatcttgagtctatttacgggaagctattcaattcggcagattaatccgcttgaaaaagtgaagttcaagtatgtgcaatggctatctttggctattgggctggtctgtttaatgctgggctttacacggattgctaaacattcatttttctcaattcaagttttgggcttcttaattctaggaattattagtttattaatttggctaaaaatatcttggtctgataaggcggctttgattagtccgaaactgtttaaaaatttacgctttagtatgcagctaatagcttattgttttgccaaaattgcaacgctagctttgggcttcatctttccaatctatgttcaggctgtcaatcatggttctgtttcattagcaggctgggttactttccctggtgcggtaattaacgcgctaatggcggctgtagcgggaaagctgtttgataaaaagggtgcgcggctgccgattattatggggataatcgctagtttgattttgatgaatgttttagccccattaagcaacctggcaattgtcttgttatacgttctttattatggcggatacgggatgtgctttggcagtttgatgaccagcggtttgatcactttaggcaaagaaaatcatgcacaaggtaatgcgatttttaatactttgcagcaattttcaggtgctttaggaacagctttagctgagaccttgattgcgctagcgcagaataaatatctgactaatggcacagcagtcggttctaagtggacatttatggtattactgattttgataattattaatttgctcttggctcttgcctttgtgccgaagaagaaatgaagggaagttcagcgaaagctggacttttttaatttaaaaatatactaactctaaatacgcaatatttgcttaatatattaaacaaaattataattattttgattaatataaattacataggagcaaaacatgaatccagatttacgagactgtaaaatagtttgtgtaaggatgaatgattccttaaatttatttctttaaacattagaaaaaggagttcctttctcgtatgattggtttgaacaaaaaaaacacatacagaaagaagaactccttcatgaatgattttaccaaagattttgctcaagctctattcaatccagacaaaataaatgatttattgcgcaaagaactacaacaggctgttaataacttgctagaagctgaattgactgcctttctgggctatgatccctatgccagaaatggctggaatactggcaactctagaaatggtgcttatttccgcaaagttgatacgcaatttggcccaattgaagtgcaagtgcctcgggatcgcaacggtcaatttcatcagcacacgctgcctgactacaagcagcactcggatatcttggaaagcatgattatcaagctttactccaagggcgtgaccaccagggaaatagccgatctaattgaaaagatgtatggcagccattacagtccagctcaggtatcaaatatttccaagcagatgattccaaaggttgaggcttaccacaaacgcaagctaagcgacaagtttttctgcgtctatttggatgcgacataccttcctttgcgccgagaaacgtttgagcgtgaagcagtctatattgccattggcattaaacctaatggacataaggaagtcattgactactgcattgctcctagtgagaacattgaagtctggacagagatgcttcaaaacatgaagtccagaggcttgaagcaagttgaactctttctttctgatggtgttgttggcatgaaaacagccttggccaggacttatcctaaagctcattttcaacgctgtttggttcatgtcatgcgcaatatctgcgctaaagtacgcgtcgacgatcgtgaaaagatcatgaacgaattcaaacaggtgcatcaacagacaaacaaagaagaagccacagctgtcctgcatgacttctataccaaatggggcaaggtttacagccatgttatcagaagcttgaaagacatagaaccagatctgctggtcttttataactatcccaagcagatcagagcttcaatttattcgactaacatgattgaatcatttaacaatgtgatcaagcgcaaagctaagcctaaggcagagtttccaactgaacagtcgcttgatgcttttattggtattcaggcaatgagctacaatgaccgttatttcaatcgaattcataaaggctttggtcaggttcaggacaccttagaatcctactttgattaaataaataattaaaaaatcaatttacgagaaagaactatttacacaaaagatttgacagtttcagatttacttgcggcacttattcttgaaggtcagaataatattaaaaatattgctattattcctcgtgattatcattttgaaaatagtttaaattatgtgttagtaggtttgcggcgggctggcaaatcaacgctattatttaaaagggcgcaggatttagtgaataaacaaaatgtggattggtcacaaattgtttacttaaattttgaagatgaacgattagatggttttcagttggctgattgtaataatatcttaattgcagccaatcaattaacaactaagaagcattattttttatttgatgaaattcaaaatattgctggctgggaaaaatttgctcgtcgtttagcagatcaaggtgaaagtgtttatttaaccggtagtaactctaaggtgttgggtcatgatattgttctgcggctgggtggaagatatatgaccaaatatgtggcaccttttagttttacagaatatttaactgctaaaaaaattccacatgataaattatccgtcttggatacagttaataatggccaaattcgtgctgccgcaaatgaatatctatgttatggtgggttgccagaatctattatcttaacagacaagagaaattacttaacaagtatttatcaaaatgtatttttagctgatatcattgtccgcaataagattcgtaatgaaaagacgatttcattattacttagaaaaattgccgatacagtaatgcaccaagtttcagaaactgtcaaatcttttgtgtaaatagttctttctcgtaaattgattttttaattatttatttaatcaaagtaggattctaaggtgtcctgaacctgaccaaagcctttatgaattcgattgaaataacggtcattgtagctcattgcctgaataccaataaaagcatcaagcgactgttcagttggaaactctgccttaggcttagctttgcgcttgatcacattgttaaatgattcaatcatgttagtcgaataaattgaagctctgatctgcttgggatagttataaaagaccagcagatctggttctatgtctttcaagcttctgataacatggctgtaaaccttgccccatttggtatagaagtcatgcaggacagctgtggcttcttctttgtttgtctgttgatgcacctgtttgaattcgttcatgatcttttcacgatcgtcgacgcgtactttagcgcagatattgcgcatgacatgaaccaaacagcgttgaaaatgagctttaggataagtcctggccaaggctgttttcatgccaacaacaccatcagaaagaaagagttcaacttgcttcaagcctctggacttcatgttttgaagcatctctgtccagacttcaatgttctcactaggagcaatgcagtagtcaatgacttccttatgtccattaggtttaatgccaatggcaatatagactgcttcacgctcaaacgtttctcggcgcaaaggaaggtatgtcgcatccaaatagacgcagaaaaacttgtcgcttagcttgcgtttgtggtaagcctcaacctttggaatcatctgcttggaaatatttgatacctgagctggactgtaatggctgccatacatcttttcaattagatcggctatttccctggtggtcacgcccttggagtaaagcttgataatcatgctttccaagatatccgagtgctgcttgtagtcaggcagcgtgtgctgatgaaattgaccgttgcgatcccgaggcacttgcacttcaattgggccaaattgcgtatcaactttgcggaaataagcaccatttctagagttgccagtattccagccatttctggcatagggatcatagcccagaaaggcagtcaattcagcttctagcaagttattaacagcctgttgtagttctttgcgcaataaatcatttattttgtctggattgaatagagcttgagcaaaatctttggtaaaatcattcatgaaggagttcttctttctgtatgtgttttttttgttcaaaccaatcatacgagaaaggaactcctttttctaatgtttaaagaaataaatttaaggaatcattcatccttacacaaactattttacagtctcaagtttcatatgcaactttgtataaaaatataaaaaatgtgattagtacggtaagtcgcaattcgattattgattatatcgattacgctaaggatgcatatttgttattttccaccaaaaattattttgctaaatttagtgagcgtgaaagcagcccaaagtattattttacagataatggcattttaaatttgttttatctggataaattgccagcattactagaaaatctagttgcgatcaagttgcataataaatatcaagagaatttattttatttaaaatctcaaaagacagggatagatattgatttttatgtaccagctagtaaaattgcaattcaagttgcatgggaagtaaatgatacgtcaaaagaacgtgaagttgggaacctaattaaattagctgataattttgatgaagttgaaaacttaataatcgttactcatggtgaagaggctgaaattcagcaagaagataagataattcagttaatgccactatataaatttttattaatgagatagtttttcgataactcataaaatggtaatgctcaaaattttttgagcattttttataactataagatctaaagagatataaaaatggacataagatctaaagagatataaaattaaagccaacaactaaaataatgaaaataggtgaacatcaattatgtctgaaataacgaatccatttgaccctaactttggcaaagttcccaaaatatatttggggcgacaaaaaatagtagaagatatagtaagatcacttgaaagtggcaccggaccctatcaaacttcaatgatctatgggatgcgcggggttggtaaaacttcattacttgctgatattacctcaactttagaacaaaaagataactggattgttatttacttagccatgacaaatgatttgcttgccacgctcatccaaagtatttatcaagaagcagcgaatccagtaaaaaaggcgttgaacaaaattgatggtgtaaagttttcggcttttggctttgaattggaagttcatatatcaaatcctcaatctacttatcaagtgttacttgaagaaatgttaaaagttttaaaaaagcatcaccaatctttattgatagcaatagatgaggttaaagaaactcctgagattgttaatttggcgtctatctatcaaattatggtgttaaaaaagtattcaattaatatgatgatgactgggctgcctaagaatgtttctgaactccaaaataatgatgtattaacatttcttttaagaagcggtcgtgtaccattaggaccacttgatcttttcgatattaagtatcggtatcaaaaagcatttgaaagaggtaataaagagattaataatactgccttaatgaaaatgactaagctgactagaggttacgcttatgcatttcaagacttgggatatcatgtttggcaacattctactgatcaggtaacagatgaaagtattgaaaattcgatctcatcgtttaaaaatgatctgtttcgtaatgcttatatcaagattatctctgaattatcgccagtcgatcgaaaatttttattcatcatggctcataatgataaaaatgttgttaatataagtgatattcgcaagcaaatgggaaaaagttctaattatatttcgcaatatcggcagcgattaatggatagtcaggtaatcattgatgcaggatatggcaaagtggcattttctctgccattcatgaaagactttttgttagaagcagaagaattatatgaaattgataattaacgaaaaaagctgctaattaaactcttcgctttcgtccaccaaacgtgtaagcaataagccgaagtgaatgacaagatccaggttaacagcaagattccaaagaaagttaagaatgggtggtaaatggcgtgatattgcatgttaagaccgcgccaaactaattgattccagaagacattggataaatatgcgcgataagcataagtagccaagaaatggaatacttttaaactggtttgcgaattttttctaacttgatgcaggcaaaaagctgaaatcagtgcaattactgctaaacaataaagagtcattgacggcttgtaatatggtgcattattgaagttgattggataaccgaacttgtgcaactcaacattagtccaaatgaagcaagcaataaataatatggtaattacccaccaaaacttagtgaccagctggttgtaataaccacgcaatcgccatgctaagacaccatacacaccatagatgaagaatgaaataaaaatgcggtcgagtaaataccagtcatgttcgtgcatgccatggaagacattgtaatcatagaaccaaagccagacaaaatagagtacgaaagtgattactgcaatccaaatacctcgagttagattgtgtcctacatagcggcttaatccccagaaaagcggcattaaaatgatgaattgcaacatcatcgtgttataccacaagtgcggggcggcgttcccattaatgaattgccagcagaatgaaccaagattgttaaaatggttaacttgttgcagccatggcatccctactaggtagattaacgtccaccaaatagtaggtacaaaaagattagaccaatttgtctgcatatgttttgcataagaaaaactatttttttcattattagtacggattgtggtatacaaaataccaaaaataaaagctggagccgtatatttgactaaattataaaaaacgccaaaaacatcttgtgtgtgaaccggttgttctacgtccatgaccagcgacataattggctgtgagattactgcgctgcaggcgaatacttttaaataatcgccaatatcagctatttgatagcttttaaattgatctgttttcatgaacttgctctcttcttttcctaatattattgtgtcatttttttaaattaggcgaaaggataatcatgttaaaattagtttagctattttggaaatggggtcaaaatgtcagtagaaaagatcacacaaaacgcactaaaagcattgctttatgaagtagttaccaatcctaagccaggtttagtggatccagttgacgtggggtctcatcctgatatgaatgtgtatttgtttattaatagcagtttgagtttagaaaattattttcggcaagcagctaaaattggagcagattttacggggcaggatttgcggcaaatgtttgaacaattgcgtcaagctggcattgaggcagaaaaagcaatgtttaagacaacgcataatataaatacccataaaggcgcgattttttcgttagggttgtttggctgtgcaagtagctattgtgaaaataataatcaaggtgaatttgaagtgatccagcagatgactaagggcttagtaaagcacgatttaggcaagaggaatgagactgctggagaaaaacaatttttgcaatatggtaaaggtggagttagagcagaagcagaagctggttatcctttggtgagggatgtagcactgccatttttagctcaaaccgaaggtgatttgaatgttcgtttactcgatacgttgatgaaaatagttagtgcgattgaagactcgaatttaataaaaagagcgggaaatattgaggttgtttcttgggcacataatcaagcaaaaaaatatttggcattaggtggctacggtactcaagctggtaaacagtttatgttagaactaaatcagatttttaaagagaaaaattatagccttggtggcagtgcagatttattgattattacaatttttatggcgttgcagcgtgggattatttaacgcaaaaattgtctagttaagaactagacagtttttttgctgtgtgtcgggcatggcatttgtttagtctagtgaaagtctagatcacgggtagttgtcgccaagtgtagcgaaccacaagccgttagcggtgacgctatgggtgaaggaagtggctagcgagttttccgagcctacgtacagaaacctggtcaggccaaatggtggatgagactgcagcacaagttaaagtccaaaggacaaccgtaaaaccaagacggtaaaccagggggcagtggaaaattaaagatgaatgtcttaccccgagagatctcgtggacaggtgaaaccgagtaagctttaatatcagcgatcgtaagcctggtcgaaaaaggttaatcgcgagaagtcagctgaggtcgtagtagtgctgaaggttttgtaatgaaactggagcgaagggcctaatgtttgtaagagcatatctcgctataagcaatgttcagacagtccggataagaggatagcctagcacaaagagaacgtaactctttgatggtgaaagcaattgggacaattctgaataaatttacaagtagaaatggagatatcacgagatggaactaattgaacagattttaagtcaaaacaatctcaaggaagcaatcaggagagtcaaaatcaataagggagcgcctggtgtagacaggagaacagttgatgagcttgatagctattttaaaaagcatcaagtagaaataaaggacgccatcatgaagatgaagtatcgtccgcaagctgttcgcagagtctacattcctaaagctaatggtaagaaacgtcctttaggaatacccacggttgttgaccgagtaatccagcaggctattgcccaagtattaatgaagatctatgatcctcattttagtgagcatagctatggctttagacctggacgcagtgctcatgacgctattgaacaagtcttggaatatttaaacgaaggctatcaatgggttgttgacctggatattgagaaatactttgacacggtaaatcatgataaattaatttcaataattagagagcaagtaaatgacaaaaccaccctccatttaattcgagcctttcttaaagctggagtaatggaagatggttgggttaagcctaataaactaggtgtaccacaaggcggccctctttcaccaattctatccaatatctatttagataaaatggataaagaattggaacaaagaggcctgcgctttgtccgctatgccgatgactgcaatatctttgtcaaaagcggtaaatcagccaaacgtgtgatgaattcaatttcatcatggctagaaagaaagctattcctaaaggtcaacgcaaccaaaaccaaagttgtacgaccaaccaagagcaactttcttggctttaccttctggaaaagtggcgaatactggcaagcaaagccaggagatgaccgcaaaatcaagctttatgacaagatgagagaacttctctgtcgcagaaaagcagctgctcagcctctatcactagtctttactaagataaatcaagtagttagaggctgggtcaattactttagagttggcgacatgaaatattttctaattaagttcagtcaatggctgcgtcataaagtacgggtggtaatcattaaacaatggaaactaccaaaacgaatatacattaacttaatgcggattaacaaggcactaaagtgcaattttagtgatgaagatattcataaagtagctaatacgcgcttaggttggtataaaagaagtacgggtcatgtcattaactttctgcttagcccaaaagtattgggcataagcaaagcggatcgcccaggcttggtcgatccgctagaatattatttatctcgtaaataatcacaaacgtagcgccggatacggaaccgtacgtccggtgcaatgagaggggcgagttataaaactccctctactctattttagatttaaagagatttaaaatgaaaaatccttttaatccgacttttggagatataccacaaatttttttaaaagataattcggataatgaaactaaaaatgtagattcaattttctatttaggtttagataccgagtattgaaaaagcattaagctattgcagatagcttaatgctttttttactatttgattagatctcttataatccaaatgcaattttgtataataatgcaccacagattccacctgcaattggtgcaaccactggtacccaactgtaatcccagtgggctgaacctttgtgtggcaaaggacataaagcataaacaattcttggacctagatctctagctggattcaaagctggtccagttggcccaccaactgccataactaaagcagtaattaagaaaccaaccccgatgttagcaatgtcttcagattgcttgaagaacatgccacgatataaaccaactgcgatgaaaagcaaaatagcagtgccaaagaattcggtaataaaaccgttgaacttactgttagccgaatcaccagtcgcaaaactggcaaaaacagcatcatcactagtggttctgccaatgtaaggccagtagacggctactaagattagttgtcccacgatggcaccaagcatttgtaccaagatgtaaggcattacttgatcccatgggaagacgcctgaacaagcctgagctaaggtaacagcagggtttaagtggttccctgaaattgaacccaagagcatggctgggagcattactccaaacccaaaaccgaaggcgatcaagagccacccaccattggcttgaccgtcacggctattaccaccggtatcacgtagtacagaattggcaactgatccgttacctaaaacaactaaaataatcgtaccgaaaaattcggcaaaatacttcattaaccaagtatgttccataatagatactttcttctcctttagtagaaaaaataagtgaaaaatagtacaaccaaaaattatactcttaactcgaaaaatagatatagttttttgtaaaaaagcaagaaaatagcattaaaaaacactaacttttaaattaattaaaaagatttactatttggctgcaatcatcacaattttataattatccagcaactcaataaattagaccgttccaaatatgaacattatttaacaagccctagataatgccaaatctacttttgacaaataaatgcataatcattatattaatttcacaaatttggtatatagctttatatatacttaatatataactttaagcgctttcaaaatattgtggtactatacagttgttcacaattaatatgcataaaaggaaagagagtagcagttaatgagaacaatatatttggtgcgacatgggcaaactttgttcaatgtgcatcataaaatacaaggtacttgtgattctcctctgacggaattagggaaagcgcaggcgacagcggtgcggaagtattttttgcaaaaagaaattagttttgatgccgcattttgctcaaagcaggaaagggcaagcgatactttagaaattataactgataatcaattgtcttatacgcgactgcgtgacctgcatgaaaaatctcatggtgaatatgaaggacaagatgaattcatgttgccatggcgacgtggctttagccgtattaatgccgcaatggagccggatcaacatgttgaagaaagaatggaacgagcgatcactaaaatcattgattcaacccatgccaacgatacaattttgattgttggacatgggacggctttaaggttatttacgcagcgagtaaatccaacttttaaagaatatgataattgcgggatagtaaaaatgtctgctgttgataataacttgaaatatttaagttatgtagcacccgctaaagatgggttttgagactgtaaaatagtttgtgtaaggatgaatgattccttaaatttatttctttaaacattagaaaaaggagttcctttctcgtatgattggtttgaacaaaaaaaacacatacagaaagaagaactccttcatgaatgattttaccaaagattttgctcaagctctattcaatccagacaaaataaatgatttattgcgcaaagaactacaacaggctgttaataacttgctagaagctgaattgactgcctttctgggctatgatccctatgccagaaatggctggaatactggcaactctagaaatggtgcttatttccgcaaagttgatacgcaatttggcccaattgaagtgcaagtgcctcgggatcgcaacggtcaatttcatcagcacacgctgcctgactacaagcagcactcggatatcttggaaagcatgattatcaagctttactccaagggcgtgaccaccagggaaatagccgatctaattgaaaagatgtatggcagccattacagtccagctcaggtatcaaatatttccaagcagatgattccaaaggttgaggcttaccacaaacgcaagctaagcgacaagtttttctgcgtctatttggatgcgacataccttcctttgcgccgagaaacgtttgagcgtgaagcagtctatattgccattggcattaaacctaatggacataaggaagtcattgactactgcattgctcctagtgagaacattgaagtctggacagagatgcttcaaaacatgaagtccagaggcttgaagcaagttgaactctttctttctgatggtgttgttggcatgaaaacagccttggccaggacttatcctaaagctcattttcaacgctgtttggttcatgtcatgcgcaatatctgcgctaaagtacgcgtcgacgatcgtgaaaagatcatgaacgaattcaaacaggtgcatcaacagacaaacaaagaagaagccacagctgtcctgcatgacttctataccaaatggggcaaggtttacagccatgttatcagaagcttgaaagacatagaaccagatctgctggtcttttataactatcccaagcagatcagagcttcaatttattcgactaacatgattgaatcatttaacaatgtgatcaagcgcaaagctaagcctaaggcagagtttccaactgaacagtcgcttgatgcttttattggtattcaggcaatgagctacaatgaccgttatttcaatcgaattcataaaggctttggtcaggttcaggacaccttagaatcctactttgattaaataaataattaaaaaatcaatttacgagaaagaactatttacacaaaagatttgacagtttcgtggttttaaataaagcagctaaaaatgaaatgttagttgtgcgttaacgaaaagagaacaagcatgaatagagataattatattttgtggtttgatcaattgcatcgcgatgatgttgatttagtcggtggtaagtcatcctcattaggtgagttgacttctgaaacgaatgtcccggttccgtatggttttgcgactactgccatagcttatcgccactttatgaattattctgatttaaatcaaaaaattgataaattattggccactttaactgatccagaagattctgagcaattgcatcgaatttgcaccaaaattagaaaattaattatagaagcgccgatgccaaatgatttagccttagaaattagctgtgcttacgatagcttagcccaaaagatgcaccaaaatgagccattcgttgctgtacgttctagtgcaactgccgaagacctgcctgatgctagttttgctggcgaacaagatacttatttaaatattcatggtcgtgagaatgttttgaaaaaggtgcaagaatgttacgcttctcttttcaccgaccgggcaacttattaccgaattaaacaaaactttccacaagaaaaagttgctttatcagctgcgattcaaatgatggccttttctaaagcagctggtgtgatgtttacggtcaatgtagcaactggtgatgacactaaggttatgattgaggcctcttggggactaggcgaatacgtggtgtctggaactgttacacccgataactatgtagttgataaaaatacgatgaagattgtacacaaaatggtgactaaaaagccaattgagttgatcagattgccatcgggaggaacaattgaacaaaaggtagcaccagatcaagtgaataagcctgctttgactgatgcgcaaatcattgaattagctggttatgctaaagaaattgaaaaacattatggctgctacatggatatggagtggtcacttgatcaaaatgataagttgtggttagttcaagcacgcccagaaactgtttggtcacaaaagaaaaagcaggagaaaaccgatgcaccacaagaagcaactacagaacaccgagtattgttaaaaggcttgccagcttcacctggttttgtctcaggcaaggtacatattattgatgatccaaaagatatcaatgaatttaagcagggcgaggttttggtcactctaatgacgtcgcctgattgggtgccagcaatgaaaaaggcggccgcaattattaccaataatggtggaatgacctgtcatgctgcaattgtatcacgtgaaatgcagataccttgtttagttggaacaactagccgtggacaagctgctacgaaaactttgaaaaacggcgagactgtcaccgtcgatgctaaaaatggtgtggtttatgctggagttgttaaagacgcggttaaaaaagtcgatgaaaagccagctgagcctgctgcagttgaatatttcccaccaactgcaaccagagtcatgatgaacttaggagatcctgatcttgctgaaaaatatgcatctttgccagctgatgggattggtttaatgcgcgaagaatttttatggacgacttatattcaccagcatcccctttatttgattgaaactggtcatccagagagggtagttaacgagctagctaatggaatcggtaaagtcgcgcgggcaatggcaccacggccagtagttttacgtttttcagactttaagtctggcgaatatcgcaacttaaagggcggcgacaaatatgagccgcatgaaccagcagacctattaggctggcgcggtgcttctagatattatgatccaaaatatattaatgcttttaaattggaacttgaagcggtaaaaaaggtgcgcgatgagttcggattaaagaatttacatgtgatgattccattttgccgaacagtggatgaagcgcgcaaagtgacggaaatcatgcggacacaaggtttagttagaagcgcagacttcaaggtttacatgatggctgaaattccagctaatattattttggcggaccagttcaatcaatttattgatggttattcaattggttcaaatgacctaacgatgcttttactggggtgcgatcggaataatgatgtgattgctgatctttttgatgaaagaaatcttgccgtcaaaagggcgattaggcacttgataaaggttgctcatcaagatggtaagacggtttcgatttgtggtcaagcaccatcagaatatccagaatttactgaatttctagtcagaagtggcattgattttgtatcagttaaccctgacatggtgaaggcgactaagctaaatgtagctcattatgagcagaggatcctccttgatcatacaactggcttaggtaaaaaggatccaaatgaatataattggtaaaatacgcgtggtgctagttaaatcgttttagttaataaaaaagtccaatcttgttagactcgacttgtaaatagtaataatagaaaagagtctgatctgattgaactgccttaagcttaagcgttttagccaccatttacaagttagttttaaagatttagtgataatttgtcggcactggtatcgtttgtatgcaccggctgagtttactcatcggcgaaatattgatcaaattaaaactacggacagtctgattttggctttacttatctggcaagctaagacaggaattgaatcacaaagaagattctgtgaatgtttcaattgtttatcacactcacgttttaatcggcgttcacgtcagctattgcaattgatttatcagatacggcaagaaatgaataaaaaggttgacctgaatggacagttcttgatcattgacagctttccggtacctgtttgccaaccaattcgcaactatcgtgctaaaatttttcgcggttatgccaacattggttataaggccaccaagaaaatttacttctatggtttcaaagttcatgccattgttagcgatgacggttacattcttgattatgtcgtaacaaaggcatcagttcatgatgccagggagacagttgaactgatagaaaatacccatccatctaattactatcttcttggcgacgaaggctatttaggcaaagaactgcatcaacagctaaaacaaatgggttacgaactttggacaccatatcgtaaaaatatgacaggagctaaaaagcacaatgatcatcaattgatggctattcgcagaacaattgaaagcgacttttcgcttctgacctattacaatgccgagaacaatcgagcacgtagtctgataggctttcaaagccggttggaaattgcaattttagcttataatttggcttattgtctagaacgatttaactagcaccacgcgtggtaaaatttataatttgatgaaaagtctttgattgcagtattgcagtcaaaggcttttttagagttcaattttgtttttgggcaattttacatttaatttagtaaaagagtaaggttgaactaatgaaatttcgtaagcatctaaggctaatctctcactggcaaaatcagggttatataaaggatcgcctacaataggacttcctaaagaggcaaggtgaacgcgaatctggtgtgtacgaccagtttcaagcgtcaatttgacaatcgcagtattgtcatcatttttttgtaaaacttgataatgagtaactgctcttaatccagtaggatcgattttgcgtttgcgttgatcaagtggatcgtgaccaattggggcattaatcgtacctctttcagctaagtgatcagcattgataactttagctaaataatcgcgatgaaaaattttgctggttaattcacgatttaaaataggtacaactgcaggatttttagcaattaaaagtaaaccaccagttaacatatctaatcgatgaacaatatagggactctgaccaagataagtagtacaatcgttcagagcagtattagtttcatttagattagggtgcgttttttgcccttttttcttattaataattaaaagattatcatcttcatagataacatcgggcatcttaccgcttggtgcataagcctgttgatcactttcaacatgatccaagttaatttcaattttatcaccaggtaaaatgttttgattaaaatagcgatagttgccgttaactaaaatattttgttcaattcgcaaaaaatgacgccacttgcgagggattaaaagttgacgtagtacttcattgacagatgccggagcaagattttctgggtaaaaaagtgtaaaacggaaactcataataatttcttaagtctaatctagttataaacacgtgttttgatagtatggtacaattttcttgtttctaaaaaggagcaatatttaatgaataacgaccaaccaagaagaggtggctttaaagatgcttggcatcgatttgatagtcgcttctttatcggacgctggattattttaatcctgctcacattgatgctcttaacttgtacctattatacaattaaagttaagacatcaaacatagctaatttgaaggcttcgctttcaaccacaactacaatctatgactacaagggtaaaaaagcaggttctttatactcgcaaaagggatcatttgtggaatatgaccagatttcgcctaatattcaaaatgccgtaatttcgactgaagatcggactttttggaagaacccaggttttagtattaaaggcatggcgcgagctactttaagtttagtgattcatcacggtcaagtaactggtggtggttcgaccttaactcagcagttagccaagaactcgcttttgacccagcagcagactttttcaagaaaattggaagaactcttttttgcaattgaaattaaccatgtttactccaaaaaagatattttaacgatgtacttgaataatgcttactttggtaacggagtttggggcgtgcaagatgcaagtcgtcgctattttggcaaaaacgcaagtgaacttaatccgagtgaagccgcaactttagctggaattttacgaaatcctagtttttataatccggttgatcacatgtcaaatgctttagcaagacgaaatttaatcttaaacttgatggtggataataataagttgacagcggctcaagctaaaatgtatcaaaagcaaggattaactttgcggaatacttttcaaaataaaaacggctatcgctatccttacttctttgatgctgtagttgacgaggcaatctctaaatatggcttaactgaagaacaagtcatgaataaggggcttaaaatttatactactttaaatcaaaattatcagggtaaattgcaggatacttttgagcaaagctggcttttcccacaaaatggtagtgatggaactgaaagccaaggcgctagcgtggcaatggacccaagtactggtgctgttcgggcaatcatcggtggtcgcggtaagcacgtcttccggggttacaatcgtgcaacgcagatgaagcggcagccagggtcatcaatcaagccgttggcagtatatgccccagctttacaaaatggctatcactatgactcgcaactatcgaacaagttgcagaaatttggtaaaaatggctatgaaccgcataatgtggacaatggctattctaatacaattccaatgtatgaagctttagaacaaagtaaaaatgtgccagctgtttggctattggataagattggtgtaagtaaaggcgtgcaatctgttgaaaactttggaattaaggtaccaaagagtgaccgtaatttagcgcttgccttaggtggattatcttcaggcgtttcgccaattcagatggcacgtgcatattcagcttttgccaacaaaggtaatttgcctaataattctttctttattaccaaaattactgatgcttcgggtaacgttttagccgaaaataataatccaagcagccaccgcgttatttctgaaaatactgctaaagaaatgacgactatgatgctcggcgttttcactaatggtacaggacgctctgctcagccaaatggcttccgtgtagctgggaagactgggtcaactgaagtacctaactcatatggatttggtaccaaggaccagtggatcgtcggttatacgcctgacattgtacttgctacctgggttggttttgaccacactaacaagcaacactacatgcagggcatttctgaaacaggaattacgcgtttatataaggctgagatggaaggaattttgccgtacaccgcgcaaactgaattcacggagaaggcacctaaccagattgtgaagaataatggttctaatgatgactggactaatggattaggtgaaaaaattcaagatggactcggttctgcaggacagaaaatcaatgaatggtataatagccttaaaggcttatttggccaataaaatttaggaggactagatggttaacatttacgatgctgctaacaagttagcagaagatttgactcaaactgatcaatacaagaagttgcaagaagcaattaaagctgttgaagatgataaggatgcttcagctttattcaaaaagatggatgaattgcaaaataagatcatgcaagcacaacaagctggtcaaccactttcagctgaagatcaacaagcttacaaggacttaaatgatcaagttcaaaagaatgataaaattgtttcacttcttacgaatgaacaggggttgtacgatttgcttggtgaagtacaaaaagcttacactaagccaattaatgatctttatgaagatcttagaaattaatattcgcgatgaaatttattcactttgcggatgcgcacttagatagtccatttcgtgggctatcttttttgccatctgaggaatttaaccatatctatcaagcagctgatcaatcattaactaaaattgttgatctggccttgcaagaaaatgtcgatttagttttaattgctggtgatacttttgatagtaatacgccatcaccacgagctcagctattttttgccaagcaaattaagcgattaactgaccaaaaaattcaggtagtgatgatttttggtaatcatgaccacatgaagcaagaagatctgctagttagtcccagtccttactttaaattgttaggcaataatgaaacagtagagcaagctacttttactacggatgcgggttttaactatgacgtaatcggcttttcatatctgaataaccatatcactgaggataaaatcccagaattcccagcaaaaggaaaaaattatacttttggtttaatgcatgctcaagagaaatcagctactgctagtcagaatgtgtatgcaccgtttacagttgatgagttgcaaaacttgaattatgactattttgctttgggtcatattcatgcgagaaataatttaagtagtacgccgtggattgtttatccaggtaacattcaaggtcgccacattaatgagatgggagccaagggatgctatctaggtgagattgatgaaaatagtggtaagactactattgattttaaagaaacagggccaattttatggcaagggacaaaaattaatcttgaaggagctatcagtaaagctgacttacaagcgaaaattattgccaagcttgaatctggacaaaaaacgtactttagtttgacgattgctggtgctcaatatttgagtgccgaagaacgcgatttagttcaggatcttgatttttggcaaactatttctcaatcgctgccatttgcttctcagttagttgatgtgcgctttgttgtgaatactagtttaaagttaaatgacaatgaccaacaagccttccaagctgccaaagaagagttatttgcaccagctgaattcaagcaaattgttagtgactggcaaaaaaaggatccagaagctgctaaattagcggctgatccagactttattgcggcggttaagaatctaacagaagtaaaactaatgagtaaattgaaaggaattaaggatgagactgaaacaaattaagattattaactttgggcagttctcgaataaaaccttcgatttgcctagtgatcaaattaatgttttctttggtgccaatgaagctggtaaaagtacaacggtagcttttattaaacagatcttatttggctttcatttgagaagtaactcttcaccgttttttgaagattatacgccgctagctcatgttagtccgatgggcggtaatttagtttttactgcagctgatggtgaatacgaacttgagcgactctatgctaaaggtgacaagactaaaaagggaattttaaccgtcaaaaaagatggtcaagttgtacctgagagtgtattttttgatcaaattcaaaatattgatggctctttttacgctgatagttttatttttaaccaagaaatgctgggtcaggttaacagtttaagtcaagaggatttgcttgagcgaatttattacttgggagcagcagattctagcaagttgctggaaatgcgcgacgattttgccaaagaaacgggtaagctttttaaaaagacaggtaaaaagcccgaagtaaaccgtctgcttaaggaaatgactgatcaacgtgataaattagcgcagactaaaaatgagtttaatgattatgaacagctgcaccaagattttgtacaaaaaagagcggcattaaacagacaaaaacaagatctggctgttttacaaaaacaagaacaagatttgcatgatttgcaaaaagaaatgggcaattatcagacgctgcttgatttgcaaaaacaggtcaaggatgtcgactttaatggtcaaaattatcaaaaagcccaagatattatggctcagggacgtaatttgcaaaagacgattcaatcggtagaagcgcagttgcagggcctgggtgaaaacgatcagtctgattttacgctagagaagaagctaatccagcagaagcctcaactcttgcagtggcaagcggaatatcgtaattgtttgcaaaaggctgaccaattgaagcaggagaaagagcaactattagctttgacacctgagttaaaaaatctactcaagttgacaccagagcaaattgaacaaatgcaggcagactatcaagctttgccaggtgctgtcaatgagcctgcttatgtaactactaatgacaagctttggtatgttatcggtgcagtgttagcggcattaggtgtagttcttttggtagcgttgggtacagttggtgtaattgcattaattactggactaattttcctagcagcaggatacttaaaaaatagtaaccaaaataagcaaaatgcggcagtattagaaaagcaaaagctggttgctcaaaaacgccaagctttccaaacaaaatatggattgaatcctgatacgctaaacttaaatagcttactaactaatctgaaccaatatcaaatcaaaaagaatgccgcacagactaataataagcaagtaactgttttgaatcagaatgtggctcaactggcctcaagtgtccaaaatgcattgaagcaaccgattgataatgactttagtcaagttttgaacggtttggacgaacttgagacacaaattagtgaaaaacaagaattgcttcaaagaaaatccagcttaactgcatcactaaagcaggacaagcaagatttgaaagaattgggtctgaaattacaggcactttttgcccaagctaatgtggaaaatatggcaggttacgatcagctttatcaagattcacttaatcaggctaaactgaagacgcagattgcggccttgaaggaatcgttaggcgatgatcttcaacagctgcaaatgcagacaaattcaaccgaattagcagataaattaacggctttgactgaacaaattagtactaagaatgcagaaattaatgaacttcagagtcaagttgctcagttgcaagtgcagttagacaatttagctgattctactgcggtgtttaaggctaagcaggatctggctaatacagaaaccaattttgtccagagcagtaaagaatacttggctaacttgtttgcggcaaggtggatcagtcgctcgcttgacttggcatctaatgaacggttccccaagatgcttaaggcggctcaggaatacttagctttgctaacgggcggcagatatgttgggattaatttagataagaagctaacagtagtcagaagtgatggtaaaaagcgcgaagtaaaatacttgtcacgggggactgctgagcaattatactttgccttgaagttagcttttattgagcagatcaaggatgaaattaatttgccaatcttgattgatgattcgtttgtaaactttgatgatcagcgagtcagctatatcgatcagttattgcaaaagattagcgaaaacaatcaagttttaattttcacagctcaaaagaatttagttgatcagcttgggattgagccattaacttttacgaaaggaacacaggatgcttaagagattgttagattacaacgatggagaagaaatggacattgttgttttgattagaaactcacagttgcgtcataataaaaagaataagttgtttttagcgatgcaattcagtgatggctcaggcgagattcgcggtaattactgggatgctaacaatcaagatgcagcaactttttcaactgggacaatcgttgagttgaatggcaaaagagaagaatatcagggtcgccctcagattaggatctattctctgcgcgtggtcggtccacaagaaggctatgaattagatcaatttattaaatcagcgccggaaccagttaatgagatggaagctgaaattaataaatttgtgatgcagattgataatccgacctggacaaaaattgtgaagtatttacttcaaaaatggcatgatcgtttttatgatcatcctgctggtaaaagcaaccaccatgcggtccgcggaggtttagcttttcatactttatcgatgcttaaggatgccaaaggtttggctgataattatgagcaagtgaatagatcgctactttatgcgggatgtattttgcatgatatgggaaaagtactggaactttcaggttctgccgcaactcaatacacgactgaaggaaatttggttgggcatctggttttaattgatgaacaaattatgctggccgctcaggatatgaagatgaatctggagtcggaagatttactcttattgcggcatatggtgcttagtcaccatggccgctttgaatatggttcacccaaattgccggcattgctagaagcggaattattgcaccgaattgatgatttagatgctgcaatttatgcagtaacgaatgccctgcagcatacgcctaaaggcgagttcaccgagccactactgagtcaagatggcaagcgatattatcgaccgatgcacgattcagcgctagataacgcaaaacatttagaataagaaataagcatcactgcagttgatttgcagggatgcttattttgttgaaaaattgaactagagttttattataatttcatagtataataaatctaatttataggggagtaaaaaggatggatattgctgaaattactaaaatgattgaggcggttaaacaaataatagaaaagaatgattacattgatttgccgctatttcagaattctagtcaattaaggttaaaaggaaataattataattttatacttgatttgaatagaaaaggacatagacgtcctaaatgtacttttctattaagggaaaagagaaataaggaacagccattagttagagtagatattattggacgtcctcatcaaaatcctgttggagactttaaatggtcaaataaagtcattccttgtcctcatttgcatagagcggattttccaaaatatggtacatatgtagctgtaccacttttggaaaagaatgaaaattttcaattgagtcagaatgatttaaataacttgtgtgaatgcttgaagaagacattaaagtttttgaatgttgataatataaattcatataattttcgagaacaggaaagtttattttaaagaaaggggggagaacagttaaatatgtttgatgtagagaaaatgaagaaaatatattttgactggatagataaaaagattcaatttgtcccttctaaaaatcaggattatatgactatcactacaccttttttagatatgtacaatgattatatagaattagtgattgcacaaggaaatacatcaaaatatataattagtgatgatgggtatactattaatgagttagggttattagatattaatttaaacagaaaatctaaacgtagggactactttcaatcgattttgattaattttggtgtgaaaaatcagaataatgaattagtaattgaatttgatgacttagcccaatttccagatgcacaaaataggttaactcaatgtatgttgcaagcttttgatttattacagacttctaaaaatagtgttattaagtattttaaagaagatgtaacaaattattttattgataataatattccagtaggagaagatttgagtttactaggaaaaagcggacggaattctaagtttgatattgtggttggacgtacaagaaaaaaaccgcaacaagctattaaggtggtgaatacgcctattaattctaatatagctaaccctttatttagaattattgatgtacgagaaagccaacctaaaacagaattttcagttattgcgaacaatattaatagtcctgtttctagtgattttaagtctgcctttaagaactataatattcctgtttattcttggtcagaaagagagcaatggctttccaaatttaaattggcaatgtgatagttgattaaaggtgttgagctgaaattgtaaataatattagttctagcattaggcaatatggaacatttagaataagaaataagcatcactgcggttgatttgcagggatgcttattttgttttggtgaaaaattgtgtcaataattttttgaacaaagttattgacaaattagctgaagaataataacatgtttatacaattgaaaagcagagatgtttttggatagattagagacttgtctcctttctatttttttattgataaaaagttcaagaggtatacattgatttcctcttggacttttttgatgcattgaattgctaaagatgttataaaaattagggtagggaataaaaatgaaagcatcaaaaaaattaattttagtatcggcagctacgataatgttgactgtacctgttttagcaaataatcatttgtctaatccagttgttgccgcaagtcaagataatacacaaactactaaattaacgttctatattaaccacaatgcctatgtttacaatcatcaaggtaagcgtaccaagagcaagattaagaagggaaagttactaaaggtgactatattgaagcctaaggcaattactaacccaaatcaaagcaggtatttcttcaataatgtattagctggcaagtatttttcgttaccgacagtaagcatcaagaagacagactttgttaatattggcaaaaataaatatattaagccaggcaacattggtagaatctcgccaggaaaatatcaatatgcggatctgtcaactaaggaaattaaggtaattaccaaaaagactgctccagtaactaatcaaatagggatgccaattgctgctccaattaagaagggaactaagcttacagttgatcagaactattatcataatgttgacggcgctgatgattatttgagtagtctggaatattatcggattaaaggtactgataagtgggtcaacctacctgctatcaaaaagtcaactcggattatgccaaataattttgcattagctgcatctactgaagataattatgtcattgccggtaactcaacgtatctctataatattgacggtgaaatcgttgataagagttatttattgattccagatgttaatgttggcgttgatcgagctctttatatttggaacaagcaaactaaacaagctgatctatattatcatcttacggctaacaaaaaattggtctgggttccagctcttgatggaacaggcaagactggtactacgattaccagcaacggctcatatgctcaccaaactaaagatacagcaaatacttttgttaaagctagtgatgtgacaagtcaaaatccagttgcattaaaagttgataatacaccgagcgaagcacaagcagatgcaagtcaggccactgctagtgactatggtgagttgcaagccttagttgatcgagcaggtcaaattaaaaaatcgactttatatcgtttgactgaaaaagcacagcaagaaagatatgatttggccgttgataacgcacaaaagttattgactaacaagaatacttctattgcggcagttaagcaggctagttggcaaattaaatacgatcaaagtaaattagacggacaaaaagtttgggttaaaaacatgaataaactaactaaggcagaaaagtcttgggtagtttcattggctaattgtgatatccatggtgatttacaaaaagaatatgctggcttttataaaggtaaaattgcggtagtgacttataataaaaagactttcaagagtgaacttgtacgctacttgaagttgtctgattatgctactgataaataaaattaaagagctcaagaatgctttaatgatgaagcatcttgagccttttgatttgtagtaaaaaaatatccaagaccgaaatcttggatactcattggagctggaactgtgcttgatgaggcaactgctagaatggcgattgtttcaggagctagattcgttgttagcccatcttttaacgaaaatactgctaaggaatgcaatctgtatgcggttccttacatgcccggttgctttagtccaacggaaattcaatctgctttaacttatggtgctgacgtagtcaaaatcttcccaggttcaattgctggtaaaggcattatttctgaaattcatggacctttcccatatgttaatgtaatgccaagtggtggtgtatcattaggaaatatgcatgaatggtttgctagtggtgcctatgttgttggtgtaggtggcggattagttggacctgctaaaaatgatgattataaagctgtattgcataatgctcaagcttttcataatgaatttcaaagtattatttatgccaactcagctgctactaggaaggtgccagtgagggcatagtttttttactgggggggaatatgatgcccctattaaaaaaataaattaatgaaataaaaaaacgtcgaatccattcagattcggcgtttttgattaactaaatatatttgttacttagtagttgaaacgtatgatgataatacatccttcaagtcgctatccttgattgaaacgtcagccttcttcaaaacagtagcaataacgtctttcatagtagcttggtcttgagccattgatgcgtaaatttggtcatcgatagccttcttgtgatcagcaaacttacccttagctgggtggctgatcatcttgattacgtggtaaccagattgtgacttaactggagttgaagtaacttcaccagtcttaagcttgaatgctgcagtcttgaatgagctgtctaaagtagtgtcagttgagtcgaatgatggcaacttaccagccttgttcttagtagcagtatcaagtgagtacttcttagctaaaaccttgaagctcttgccatctttcaattgcttgatgatgctttgagcagttgacttcttagcaaccaagatgtgttgaacagttaccttaggttggtagctcttccaagcttgttgttcttgcttcttagtaactttcttaatgtgcttcaatgcttgttcagaaagaaggttagtcttaatgttttgcttgaagcttgaagcagtcataccgttttgttgtaaaacagcactaaattgtgagccgtattgcttcttgtagttgttgtattgcttgtcgactttcttttgagatacgtacttgccgtattgttgttccaaagcgcggttgataatcatattagccaaagttgacttaccggcttgtgacttcttcatttcatcgtagtattgttgttgagtaatcttaccgcccttgtaggaagcaacagtagccttagtgccgctattagaacaagcagcagttgataatgcaacgccagctacagctacgactgcagcaatttttttcatataactcttcataaaaataatatctccacatccttaaataagtaactgttcattaatataccataaaaaagggcgtttcgttttcaaattacgaattttcacagaaaaatcaaattttctttattttttcttagttctttgtgtcttgtgagttagtatctggcacgatgttttccaaatcttggttcaatttatcgctctttttttctatgcggttaacgataggttgaatatggtcggaataatgttcaacactatcattaatatcactaattgtacgttcagctgttggcatttgttcatttaattcttgactagcctttttagctttttgcaaggcagaattaaagcgttggctttcatgtttaattgcttcgaactcatcttttaatggcttgcctgggcgattaccattgctatctttcatacaggaaaaaactagcccagctgttgcaccaaaaactgtgcctaataagaaatgtttcatttttaacctctaaaattgtgccttaattttgttagcaacttcgttgtatttagcttcatcgtatttgtcagcgttgttgcgggtcatcagcttcaagccatcgccttcaaaacgaggaatgaagtgaatgtgtgagtgcataactacttgatttgcggccttaccattattagtagtaatgttcattgcagtaacattagggaaggctgccttaattgcattagcaatttcaggaatatattgtaaatagcgttgtgcgtcttccttggtgtagtcaaacaagttaacgatgtgcttttttggcaccattaaggtgtggcctgggttaacttgagaaatatctaagaaggccttaacatcgtcattttcaaaaacggtatagctaggaatttcaccgcggataattttgcagaataaacaatctttgtctaaattttccataataaaacctcatatccttgtactttagtttactattaaatccatgctatcataataaaggtataaattcagtaaagaaagataggaaaaatgacattaaaaattgaacatttaacgggaggctacacgggtgtcccggttattaaagatattaatttggaaattaagccgggtgaggcactaggcttgattgggctaaacggcgcggggaagtcaactacgattaaacatattttgggtttacttcgcccgcaaaagggtaagatcagcttgaacgatgttgtattgacgcagcaaccaactaagtttaagcgtgaagtagcttatattccagaaacaccgattttgtatccggaattgactttaaaggaacatttggagctaaccatgttgagttaccacttggatgaaaataaagcatggaaacgcgcacatgagctgcttaagatgttcagacttgatgacaagctagaatggctgccgattcacttctctaaggggatgcggcaaaaagtaatgattgtctctgcctttttagcagatactagtttgcttgtaattgatgaaccatttactggccttgatcctttggcagttgctaacttaatcgatttaataaaaaaagcaattgctgacaaaaagatggtcttaatgactactcacgttttagctgatgcacagcaagcgatttcgaattatgctgtgttaaaccgcggcacgatcgaagttgtggggagtttgcaagaaattcgtcagcactatggccttaagccagatgatccttttgacaagttataccttgctttgaatagagaggataatggcaatgcgtgagttagcgaatagaaggttgagcgagaatcttaaacaatcagtaaaatatttgacgctggtgtttaatgacttctttattttagcgttgatctttttgtttggggcgctgatgttctggtatgcccaagctatgcgcgtaattcccaataatctgtggttctataagccacttgtcggctttatcatgtggttgccattattagctggtcgattagttaccttattaaaagaggccgacatgcaatttctgtttacgcaagatgaacaaatgggtgaatatctgaagccgatgattcgttacagtatggtgctgccaacaattctgattgttttgcttggcggaattctgtttccgtttgcgacggtaaaggctggaatcccagtttggtcatatgtaatcctgattatcagcactgttttattaaaattgtgtatgttgctgattgaaaaagagagtttgtacttctactacaattatccgcaatggatattattagtggtaactctggcggctttgttgattggctcactaggatcatttatttatccaattgaagttgtagtattaatggtaattacgcattttggtactaaaaaagaaaagggcgtctttaactggcgctatgcgattaaaactgaacaagctagaaaagatcgcgtttattcaatcttcagtatgtttaccgatgtggcagaaaagcaagttacaatcaaacgcagaagatacctcgactttcttttaccaaaatcattggctaaggaaaatcctaatttgttcttgtatcggagatcacttttgcgtaatccagaatacttgaacttattagtcagaatgactgtctttgcaatcttggtatcgtggttagtgcaagattggcgttgggcactaggcctttcatgcttggtaatctttttaacggtctatcaattattgccaatggcaacagagtttgaccgcaacttcatgtaccgcgtttacccaattgaacggcaaaatcgtggcagggacttggtagaggtgttgacaatgggcttgtttattcaatggctcttgattagtgtctgctggttaattgtgctaccaattaatgttaacttgtttgaagcgatggcaattttacttggtttcactatgattgtaactgccacttacttgccaggcagagttaaaaaaatgaatcaaaaaaattttggaattagataggaatagagaatgagattaagaaataaaccttgggctgttaagcttgtaaacgaccatccagaaagtgttttgcaaaatcctgatcctgaaaaaaagatcgactggactgaacgatttggtaatgatcatcccatcgaaattgaagtaggttctggtaaggggcatttcattactacgttagctgaacaaaatcctgataaaaattatgttgcattagaattgcaaactacggctgcggggattatcttgcgaacaaagttggaaaagggcttggataatttacaaatcttacgcggggatgcggctgacatcaactgcttctttccagcaaatagcaccaatgttatctacttgaattttagcgatccatggccaaagactcgtcatgaaaagcgtcgtttgacttacaagagttttttgagcaagtatgaacaagttctgaagccagaaggacatattgaatttaaaaccgacaatgcgggcttgtatgcttactctgttcagagcttgaataattatggaatgaagtttgattttgtttcagttgatcttcatcatgaaaagccagagattgtggaaaagaatattgaaacagaatacgagcataaatttgcagctaagggtaatccaatttatgctttgcacgctcattttgaggatgaatagtttgaagcgtctagagttacagcagataaactctaggcgttttttaatgctttattggataaaatcttgctactagctcatcgctttagttattttgttttagaatagaactgtaagatttcagattattggagggaaaattatggaagataaaccttattatgaacaagaatatcacgaacctaaaactgatattcctagaccaacttttggacaagcattcaaacttttgtttactgcaccatttaagtagaatgcacgtagtactcgtcgtggattttggtatgcctatgtttgggcaattattttgctagtcattttagcagcatgttcagctacggcatattcaattgatggcattgcttattcaagtaatgaattcttcttattaacgcacgtttcaactggtacacttattattcaaataattatctatctactgattatttggatcttattaggcttacttggctttaccataagaagattgcatgatactgaccacaccggttggtggtactggatctcggttattccatttgggtatttgtttttactttacttcatggttttgccaactgttgaaaaaccagttcgttggggcagttatctatttaaagaaaagaaataattgtaagactcaatttctagctttttagttaaagaatggttataataatatcaacttataaaaagtaagaaatacatgaggtatgaaaaatggaaaagattaaagaattaactgaagatcaattaaaggaaattactaaagaaggacgtactgtgcttgaattctcagctgattggtgcccagactgcaagtttcttgctccatttatgcctgaaattgaaaaagatttttctgatgcaaaattctacgaaattgaccgcgacggttcaattgacatagcaaaaaaattaatgattatgggaattccttcatttgttgtctaccaagatggcaaagaaattggtagactagtaaataaggaccgtaaaactaaagatgaagtggaaaactttttacgatcacttgactaatagaggagaaaaaaaaagcatgattactagtactaataaagaagcttatcctaacactttgatcgttatcttaggtcacgatgaaggccgtagctcatttgaggaaaaagaagacgttactcgcgtaactaacgatgaaggcaagaccattggttacaacttcttcaacgttgataagttagttgactttgataagttaccaaatggtccagttaagttgtcagacgatgagcttgttgcactgaacaagaagcttgatgaagttggttttactgacaagttagcatatggcaagccaactttagtttatggctacgttaagacttgtgaaccacaccctgattcagatcacttgcacgtaactactgttgaggttgctgatggtgaagaacaccaaatcgtttgtggtgcaccaaatatcgctcaaggtcaaaaagtagttgttgcacttccaggtactttaatgccaaatggtgcacaaatttggccaggtgaattgcgcggtgttgattcatacggcatgatttgttcagctcgtgaattaggtttgccacacgcaccacaaaagcgcgggatcatggttgttcctgatagcttcgaagttggtgcagaatttgaaccaactaagtgtgatgaattgattgctagtggtgaaattactttataatttgaataaagcaaaaataaaaagttaaccagttggtgcaaaaaagctaattgatcaacttttttattttgtctaagaaaagccaccagtttcaccttttaaggagctagtgaaccaattttgtgggaaatagttttacccgtaaggtctttaatgatcaaatgatcgacagtattaacataattgtcgttttcatcatagatttcttttgattttaaaaattttagcataagaaaaatggtaaaataattaacgaataaaaacgttgaaatttcgagggacaaataatgttagataaaaataagcaaatttggtttattggaatcaagggtactggaatggcatccctggcactgcttttacatgacttaggctataatgttgccggcagtgacatcgagaaatacactttcacccaagttccacttaaaaaggttggaattgaagttaagaattttgatccagctaatatcaagagcaatgctgagcaagtaattgttaaaggaaatgccttcaaggaagataacccagaagttaaggcttgcttagacaaagatgttaagtggcagtcttacccagatactgttgaagaagttgttcaaagtcatacttcaatcggtgtttctggtacgcacggcaagacttcaactactagtttgctagcccatgtgctcggtgaagtcgctccgacctcatacttaatcggtgatggtcgtggtaaaggcgttgctggttcacgtttctttgtatatgaagccgatgaatatcgtcgtcactttttggcatatcatccagattaccaaatcatgactaacatcgactttgaccacccagactacttcaaggatcaagccgattacaccagcgcttttcaatcagctgctgatcaaactaagaaggccttgttcgtctggggtgatgacaagcgtttgcaaagtttgaagaccgatattcctaagtacacttatggctttaatgatactgatgactttcaagctactcaaattgagaagtcgactactggttctaagttccacgttttggctcacggtaaggacttgggcgaattcgagattcacctctttggtgaccactcaattttgaacgccactgctgttgtggccgttgcttacaccgaaaaggtgccaatggaagacatcaagaagggcttgccatcattcaagggtgctaagcgtagatttagtgaaaaggacttcggcgacattgccgtcatcgacgactatgcacaccacccaactgaaatgcgcgccactatccaagctgctcgccaaaagttcccagacaagaagttggttgttgtgttccaaccacacactttctcaagaactaagaagtatcaaaaagacttcgaagaaatcttgcgtgacgttgataaagcttacgtaactccaatctatgcttcagctcgtgaagctaacggtgatatttcaagtgaagacttggttaagaatattcctggctcagaagtaattgacttagacaatattgctgacttgactaagaataagaattcagtcattgtctttatgggtgcaggtgatattcctaagtatgaagatgcttttgaaaaattgctttaattgaaagataagcatgaaaaaaactgttctcaataagagagcagtttttattttggctaatctttgattttatccttgagatccaggctcttttcataaataaagtaaccgatgatgcaggtgatgatatcactggctgcttgagcccaaacgataccgtggtagccaaatgtgacttttagaatttctaatgcgataaagtagacaacgccttggcgaacgatggccatgataaacgctgcccatgcattaccaactgattggaagacggtagtgtaaactaaaatgataccaacgattgttgtggtaataatagtggcaattaacatataattaccagcgttaacgatatctggttgattcataaatagagcggtgactggacgagcaaataaaattaataatccgcctgaaattacagcataaacaacttgcacaagaatatcgaagtttagaattttctttaatcgtttccagtttttagcaccatagttgtaaccaattaaaggttgtgaaccaaaggcaaaaccaacgattaccaagataacgatactgtaaatcttttgggtgattcccattgcggcaactttgtttgcaccgtatagagctaaagatgagttaagaagtgccatgccagagctttgagcgaagttggtgattgaaccggggatgccgattgctacgatatctttgattgttttgccgctaattttgctatattttagctttaatttgatgtagtcagttttgtataaaacgtagtaaatgagaatagcatcagtgactagataacctgtaacgttggcaatcccaacaccgattgcacctattttgaaaacaaacaagaaaataggatcaaggatgatagctaaaatggttcccgtcattgtagcaaccattgcttgggtagctaaaccttctgttctgattaagttctgcggaatgattgagaagataattggcgcagcaccaattgatattacacgataaaaatcggcagcatcttgataggtggcagcttttgctcctaaaagatgaaggatcggattttctaaaattagtaaaatggctgttagtattaaaccagtaacaaatccaccgatcatacaaaaactgcttacacgtttacttaattgataatttctttcaccgaatagccgtgaaattagtgaagatccaccgagcccaaaaatgtcagaaacagcgattaaaaaagtaaaaagtggagcaccaatcgtaattcctgctactagatttgtatcacccgttttggcaacaaacatcgtgtctgccaagttgtagatcatggtagtgatcatccctaagacgaccggtaatgctagcttaaagtagaccttttaatcggcgctttagcaaataattcatccataaattttccccccacattgaaaaaagcgacctagaaagatactttgaggtaaacctcactattctaggtcgctacgttatatcatttatttaattttagcatattgtgttaatttgcgaggtgattatctaaattaaagttaccttgaaattcatcagtagtgctttcttgatccataccatattcggcatcgtcgccccagtaaatgtattgtgcgtttttacctttggtgccagcaattctgaagtaaaggccagcttcatcaccttcaccagtggtcttggtggcatctaccttaactttttgaccaatcttgagcaacttgctggttgatttaagcttattattcaaaacatggattttgtttaaaatagtggcggtagtggtgccagaagcttggtaaagggtgttgccgttgacaaagccaacatttgaagcatagatataagcgccattacctaaggcgtagaatggcttacccttgatagtggttgtgttcaaacttctctttttagacccgctaagatttgagaagtagtaaaatacgtcattcttagttgtggcgtgggttttagctggtgttttaactaacatatatttagggatgagtgacaaaccattgaaagtagtgcggtgaccgtttttatcataaatgcgagagttggaactcaagattaaaacattttgtccatccattgagctaacattcaaagatttgatgtagcgttttttaccgatgttaacgtaagaagcggtagtgtagtggtagttcttagaagtttttgcatctacttttttaccttggatcaggataggcttgccataatatttaaaacttgagcctgatttaatcgttgaagcaacagtcatcttcttgccattgactttttgggtagtggtagtggcattgcctttgctgttgaagacttgaactgtgccgttaaaggatttcttgagagtaactttacctttttgtgattgcgtagctgcttgaactgtgtgaacaggttgattgataatagcagctgctggtgcaacactgattaataaagctgctgcgatagttgctaattttttagtagtcatattttgtctcctttgtaataatcccttaagttgattttagcacttatgagactataaaaataacctcgaaactcaaacgttttcggggttatttgattttattcacttaagtacttaggatcaataaatttattgatcacgttgttaaccttctttgaattattgtacttgcggataatgttcaagaagtcttgtgcagttgcttgcttcaagcagtaagtttgatagtaatcgtgtaaagcatcgaagaacttgttttcgcccatggcaacctttaaaacagcagggaagtccatcccaagttcgtaagccatgtcttcagtgtcaacgccctttggtggattattaacagggtagttgatgtagttggccttttgattcttattaatgaattggttagcattttcttttaagattttgttagcacgcttgacgttcttacgagtatagaacttgctgtgcatcagtttagcacagtaagccttactcttagtgtaggtcaaatcgtaaacgccattttcaaggatgttggtaagaccttcgtcaagccaaggttccatgtattcgtcgctgccgacagtgccgtagaaccattggtgaccaacttcgtgagaaacatcttcagttaattcattatatctatcaagtgggtgcttctttagtaaaaagccgctggcatcgatcatgatcaagccaggatattccatcccaccggtatctttgctaagcaagccttcagtaatatcgatttctttgtaaggatatttgccgatctttttggtaaaaatgtgaaaactgtcttgggcagtcatcaaagcaagcttgttgtattgcttgctgtttttgcttgcaaggtagtagtcgttgattcttacgccgtttgcataagcgtggtcaatcttgaacttgttggaagtagcgattgcgaactcacgcatgttgttggcggtaattgtagttttgccatttttggttgtgctttgaccagaagcggcaactttgtagctctttggtgcgaagaagctaacgtggaaattgcttacagcactgttgcggttttcaccagcatcgtagtatgggtgataattccacttaccgttgcgataatcgcttaagtatgggaaacagaatgacaggttataaaccttaccgccgttgatattttggtagccaaaacgatcttgtctcttaggcacgccggtaactacgttgacagttaaatcagtagattcacctatatttagacttttgttaacaaataaattgctcttgtctttaccggtagtgtaagaaagcttttgaccatctgatgaaatgcttttaactgaagttgtcgcatttcttgtagcctcaaaatgcttgtggtcgtatttcaacacgccgctagcaatatttctaaccaataaatttttaacaggttcattaccgttattaacaacgtgcatggtaactttttctgttaattgattcttgcgagtgtccaacttcacgatcatgttgtaatttgttgccttgatcgtaggatcagccgcagcttgaacttttgagttgaagctaaataatgccgcaatggttactgcactcgacaataaaagtgttgttcttcttttcataattttccctccaagaaaaatttattctaattattggaagttatcagcataaagtcaatctattttttgatgataggatataatttatgtataagtgaaaatgaatagatataaagaaagaagataaataagaatggttaaaagtattacacctcatttgttttatcgcttgaatgggatgcaccatgttgtagcccaagttggtgtagtaaatggtgatcatgtttttgccttgcaacttcttcacagtgcacatgatgtgttggtttatagaaaacatgaaggtttaactaagaacatcgattatactgatccacacttagtaatgatgggctttggccacacgcaaacctgggtagcagctaatgacaaggatgaatatttcgtaggtgctaaaccaaattcaggcaactggactactcaaattgcacgagtaaagtacccaagacttttaccagaaagatatacttcaaatacacaacttccacgtttgtcacacttgaatcacgtaaccgacgttccttatgatggtcatgatcacttgcacagagtagaagcttcagtttcaccaaatggcaagtacttcatgattgcttcaatttgggatgatggttcaggtcactttggtttgtttgacttaaatgaagtaaaccaaaagttgaatgaaaatggcactaagaacacgccaattactgatttgcattgccttagtgcttttcacattgataactttgatcatccaagcgtggcaccaagtgaagaagctccacaaatgattgattctgttcagggctacgccattgatgatgacaagaatatttatatttctaaccaattgtcacccaagattgatcatgcgaatggtgaagttactacttggtcacgtaagatcgttaagtttccatggggtgaaactaatccagagaactggcaagtagcaatgattgatggtattgatttgcctgatcgctacagtgaagtagaaagtattcatgttcaggcgccagatgacatttatctaactgtggcttaccaccaaaaatatgtcaaagatggcgagtttaagttaagaactttggagaatcaaattttccacattagtgatttaggctaaaattagattcttgagactactgcaaaaggtagtctttttatttttgtaaaaaagctatgcaatttatatgcaaacgatatataatagtggtaaatagaaaggagagggtaccatggctgagaaaacaactggactttatgtcagaatgaatcctgaaaagaaagaaaaagcagaagcaattttaaagcaattaggtttgaattcagctactgcaattaatatgttttatgatcaaattattttacgtaatggtattccttttagagttgagattcctaatgcttgggccaacttggactacatgaacaagtatgagtatgctcatctacttgatgaaaagcttaaccgcttggcagagcagaccgatagttcactaggtgaattagccaagggagtcgatcccaagaagaaggacgagtaatttttagttgaggtataaaaatgggtattgttattacgctaatcgttttagttttagttattgcatatatttgttgtggttttagaattgtaccccaaaataatgaaggcttagttgaaacgttgggtaaatattctaaaactgttaaggctggctttgtctttgtttggccattatttcaacgaattcggaaagttccattggcattgcagccattagaaatttcaaagtattcaattattactaaggataatgcagagattactacttccttgactctgaactacttagttactgattcataccgctacttctacaacaacaccgattcagttgagtcaatggtgcaattaattcgtggtcacttgcgtgacatcattggtcgaatggatttgaatgcggctttaggttcaactaaggaaatcaatgatcaattgtttacagcaactggagatctaactgatatttacggaattaaggttgtcagagtaaacgttgatgaacttttaccaagtccagaaattcaaagagcaatggacaaacaattgactgctgatcgtgagaagaccgctgctattgccaaagctgaaggtgaagcaagaacgattgaaatgaccactaaggccaagaatgatgctttggttgcaactgctaaagctaacgctgaagctgttaaaacacaagccgatgctgatgcataccgtgtataaaagatgcaggatgctttagctaaagctggggaaggctacttcagaaatcaaagcttagacagcttcaatcaattagcacaaggtccgaacaacttgattgttgttggaaaagatgagatgacagatttaggaaaggttccagctttaaagaaagtatgggatgaatctggcagtcaggatgacgctgaataatatggaaaagcacttacgtgcttttttgttttgattactgattgataaaatccttttttgacaaagaatttaattaaatttttgagtaaaaatcgtaattaacagagattcactattttactaaaacaacatgctgaaagattagtatgaaaactggtaaaatagataagtaaaagaatagatctatttgttaaaagggagataaaatggctgataaaaaattacttctaatcgatggtaactccgtagcttttagagccttctatgcactttaccgccaactagaatcattcaagagcccagatggtttgcatactaatgccatttatgcttttaaaaatatgctcgatgtactcttaaaagatgtcgatccgactcatgtgttggtggcttttgatgtgggcaaagtaacttttagaactaaaatgtacggtgactacaagggtggtcgggctaagacgccagaagagttgttagaacaaatgccgtatattcaagagatgctacatgatcttggtattaagacttatgaattaaaagattatgaagccgatgatattattggtacttttgctactaagggcgaagaaaatggttttattactacaattgtaacaggagaccgtgacttgacgcagttggcttcagacaagacaacggttgaagtgactaagtcaggtgtatcacagcttgaggcttatactcctgaacatatgaaggaagtaaatggtgtaacgccaactgaattcattgatatgaaggctttaatgggagattcatcggataattatccaggcgttgaggggattggtcctaaaacagcttctaacttgatccaaaaatatcatacagttgaaaatctgtatgatcatattgatgacttgaaagcttctaaacgaaaagaacgtttgattcgcgataaacacaatgctattttaggcaaaaaactggctacaattgatcgtcattctcccgtgacaattgatattgatgacgttaagcgccaaccaattgattatgaaaaattacgccaattctatgaaaagatgaatttccgtaagttcttggcagaactgaatgctagcggtcaaggccaagatgcaactgaagtagaaaaagttgaatacacagttcttgatgaccaaaatgtcaagaaaatcaaagctaatgcagatgaccaaattgaattttatcttgctatgctaggtgctaactatcaccttgctccatttgtcggttttgctttaaaaatcaattatcaaatttacgtttcacgagatgttgaacttttacaagagactaatttgcgacatttattagaagatgagcaaattaagaaaaatgtctttgatttaaagcggacaatggttggcttacatcgattaggtatccatgttcacggtcaagattatgatatgttgttagcttcatatttgatcaataatgaaaataattccaatgatctaggtgaaattgctcacttgtatggtgattattcagttaaaaccgatatagaaatctatggaaaaggcaaaagtgagcatgttcctgatgacgatgaagaactatttaatcatttggcttcaaaggttaatgctatcgaaaacttgaagcagccactacttgagaagcttaaggaacacgaacaagatgacttgtttgatacaatcgaaattccgactgctcgtgtattagcccggatggaaatcaacggaatgaaagtggaggcaagtactctgctcgaactgcaaaatgaatttgctgttcggttaaaagagctggaggataagatctatcaacaagcaggcgagcgctttaacttgaattcacctaagcaattaggtcatattttgtttgaaaaattgaatttaccagtaattaaaaagaccaagaccggttattccacttctgttgaggtattagaccaattaaagacacaaagtccgattgttagtgaaattttagattatcggcaaattgctaagattcaatcaacttatgtcaagggcttgcttgatgtgattcagccagatggtcgcgtacatacgcgttatctacagacattgacagcaactggtcgactttctagtgttgatcctaacttgcagaatattcctacacgaactgaagaaggaaagcaaatcagaaaagcctttgtgccaaccaatcctgatggttacatcttctcttgtgattattcccaagttgagttgcgggtattagcacatgtttccggtgatcagaatatgcaagaagcctttaagacaggctatgatattcactcacatacagcaatgagaatttttcatttagattcaccggatgaagtaacgccattgatgaggcgtcatgctaaagccgttaacttcggtattgtttatggtatttctgattatggtttatcaaagaatttaggtatttctagaaaacgtgctcaagagtttattgacaattactttgaacaatatccacaaattcgtgaatatatggataaggctgtgcaaacggctcgtgaaaagggctatgcagaaacaattatgcacagaagacgctacttgcctgatattcatgctaagaaatttacagttcgttcttttgctgaaagaactgcgattaactcgcctattcaaggatcagcggccgatattatcaagattgctatgatcaatatgcaaaagaagctagatgaactacatttgaagaccaagatggtcgttcaagtacatgacgaattgatttttgatgtgccaaaagatgaattagaaacgattaagaagatagttccagaagttatgcaatcagcagtgaagcttgatgtgccattgattgcagattctggttggggtcataattggtatgatgcaaagtaggtgatttaatgccagaaatgcctgaagtcgagacggtgcgacggactttaactccgctaatcgttggaaaaacgattaaaaaagtagtactttggtatcccaaaattgtggcaacagaccataagaaatttatcaaagaactaccaggtaaaagggtcttaaagattgatcgctatgctaaatatttactgatacgcctaagtgataatttaactattgtgtcacatttacgcatggagggaaaatatcatttaaccactcccgatgcgcctaaggataagcatgaccacgtagagtttatttttactgatcaaactgccttgcgttataatgacgtgcgtaagtttggccgcatgcagctgattttaacaggtactgagcgccaagtgacggggattggcaaactgggccctgagcctaatagcatagaattttcgtcagattattttatcaaggccttgagccgtaagaagaaaaatattaaaaatgtcttgcttgatcaaacaaccgttgcaggtttaggtaatatctatgttgatgagacactgtggcagagtggaattcatcctttgagtgccgcaaataaaattccagcagaaaaagcaaaagagctgtggcagaatattaaccaaactattaaaattgcaacaaaaaagcgtgggacgactgttcatacttatttagatgccaacggaaatgttggtggctatcaagaaatgctcaaggtttatggtcatgcaggtgaaccttgtgcaaagtgtggcacggaactagaaaagattaaagtatcaggcagagggacaaccttctgtccacattgtcaggtggtttattaatgagctatgttttagccttaactggtggtattgcaactgggaaaagtacagcggaccagttttttaaagcaaataaaattcctgtgatcgatgatgatcagattgctcatgatttgatggagcctgggcaagcttcttggcaggcgattaaagattattttggctcagagtatttaaatgatgaccaaacgattaatcgaaagaaattagggcaattggtatttaaggattcgcgggctttaactaaattaaatgagttaacgcatccgttgatttttttgcaaacaaagaaattgctaaatcaatatcaagctcaaccaatagttattcttgatgtcccactttattttgagtcagggatggataagaaagatatagctgacggtgttttagtgattactttgcctgagaaaatgcaattacagcgtttgaaggagcggaatcatttaaccgatgaagaagcaagaattcggatgcaaagtcagttgcctatggtcaaaaaagagcaattggctgattttgtgattgaaaatactggtacaataaaagaactagagaataaactagcacaattattggtaaagattagagaagagggatagctatggaatgtccaaattgtcatcaaaatgcttctcgcgttattgattcgcggcctagtgatgaaaaccgggctattagacggcgcagagaatgtgaaaattgtggttttcgctttactacttttgaacgagtggaaactgctcctttgttggtagtaaaaaatgatggtactcgtgaaccattcagtcgaaagaaaattttgcacggagtaatggcagccggacaaaaacggccaatcagtagtgaacaatttgagcaattggttgatcgtgtcgaaaataagataagaaaacaaggcgttagtgaaatttcatctaagaagattggtcagtatgtcatggatgatttggctaatttggatgacgtagcttatattcgctttgcttcaatttaccgtgagttcaaggatatgtctagctttatgaagacaatggaagatatgatggccaaaaaaggaaagggtaattagtcatgttcgcaacgtctgatcctaagcatctttattatgtagccaacaagattaccctttttccagagaatgagaaaatcttgattaaactgtatcagcctttggttggcgcggtggcaattgccttgtatcagactttgatcaatgactatgatccatatggtattgtttctgattcaaagggaatttattcactacaggagcaacttgattgtagtttaaaagatatgtttcattctttgcataaactggaagccgtaggtttagtgcaaacttttttagcggataatgtcttcaataatatcattgtttttaagttattacaggttcctagtgcagacaaattttttgcaacaccactgctagcaagtttgttgaaagaaaaagttggcagcccaacctttcatgacttgagtcatgcttttgctaaggaagcaaaactgcgtgaaaagccaatcaagaatgcgcgcgatgtctcagccaacttttttgatgtttttcgcttgccaggggatgaagcaattaatccatctaatgaggtagtagaagctgcgcaggaaaataaagcgcctgagatagaaactgctgaaattaatgcccaggatccaattgattgggatctgattaaagatcaatataatgtctatcaaattccagctcaagaagtagaaattaaaaagaaccaaattcggggcttaatacagacatataatttatcggaacaggaatttgtggatgagactgttccctgtttgcatggtacacataaattaaacatgcatgaaattagtaataccatagcagaaaattataaacgattgcatactagggaaaacattcaaaaacaaattgaagaaggcaaaaagcgcgctattgcgactatcaaaggtttggatgctaatgatagaaaactgttactcgaagctaatgaaaattccccatctgaatttttatacaaattaaaaactgaaaagggtggaattgtagctccaggcgaaaactatattattaatcagctgcacacgcagtatggcttgccggaagatttgattaatattttgattcatacctgtttgacctacgatactgttgtaacttctaatcgtgcttatcgaatagctaatgattggctgcaaggtggtattagtactggggtacaagctcttgaatatgtgaagaagcgtaaagccgatattcttaaaaagaaaaatcgacagtcatatcgacaaaataagcgagtcgaaaaaggtaccgattggagcaagaaaaaggctaaaaatgaaggtatgtcaacagaacagctgaaggatatctttaaggatctgaaaaataagtaaatagagggtaggtgaaataatggaagcaattggtgatttgcttaaaaaaatagttaaagagcgtaatttaggtaatgagaaagaactgttgaaaactgctttacacgatccagatgtgcaagcgtttttgcaggcaaatagggaaaaaatagataaggcgatgattcgaaatagtatggccaatatctatgaatattatgcgcaaaaacatagtcagaatcaggtgctggccggttatgctccgcaattatttttaaacggcaaagtaattgatgtacgttataaacctaccgaggctaagattgtagcagatcagcaacgagcagccaagcggcgtcttcatttaattgatctgcctgctaaattgcatgatgttaatttaagtgatattgaggttacaaatgatcgccagcaagctttaaccctgatttatgattttttgaaaaagtacaaagctgatcctcaccaacaaggcctttatttgtcgggcgactttgggatcgggaagacctatatgctagcgggacttgcaaactatgtagcaactaattttgatcggaatgttgtatttttacatgttccaacttttattgcaggtttatcaagtcattttggtgataacagcttgcaagatgagatcaggaatttagctgaatgcgatgtcttaattttggatgacattggggcagaaacattaagtcagtggtcacgtgatgacgttttaggagtaattttacaggcaagaatggataatgttttgccaacctttttctcttctaatttagatatggaagcattagagtcacactttgaggaaacccgtaatgcaactgatccagttaaagctaaaagattaatgcaacgagtacgttttttagctaaagaagtagtagtttccggtcccgatcgacgaaatttttcgcattaatttcaaaaagttcttgcatcgttcactttgatgcgtataattgaagttaattaaacgagacatgatgatgttcggctcagagagaaggacctagttctggaagttcttcattagaaaatcaccccaatcgtttattcccaaaattgaattttaagaggctggatacctttatcaatctatacgagaggttagacgtacgctaacctgaattttgggtggaaccacgcaattaacacgtcccagtgcttttattagcactgggatttttttattggaggtaaaaatatgagtttttcaattactttgccagacggttcaaagaaagattttgataaggctgtttcagttaaggaagtagcttcatcaatcgctacatctcttggaaaagctgccgttggtgctaaagtaaatggcgttgttaagccacttgattatgaaattgacaatgatgttgaagttgctattcttactgacaaggatgaagaaggcttagacattttaagagctactgctgcttttgcacttgaagcagttgctaagaacaagtacccagaacttcgtttgggtcaacatgttgctgatgaaggcggcttttacgtagatactgacaaagatgaccaaattaaggttactgaattgccagaacttgaaaaggctatggaaaaattagttaagagtggtcaagcaattgaacatgttgtaatggacaagtcagaacttgaagatattttcaaggatgacccttacaagactgatcttttgaagaaaattgatgctgacaaggttgatgcttacaagttaggtgatttcgttgactttggctttgatgctttattgccaaacactggtaagattaagcacttcaagcttttgtcagttgctggtgcttactggcttggtaaatcatccaacccaatgcttcaaagaatcttcggtactgctttcttcaaggaagctgctttaaaggaagatttgaagcgtcgtgcagaaattaaggaacgcgaccacagaactatcggtcgtgaccttgacttcttcttcgttgatcctaaggttggtgctggtcttccttactggatgccaaagggtgctactattcgtcgtgttgttgaacgttacattatcgaccgtgaagttgctgacggttatcaacacgtttatactccagtattaatgaaccttgatgcttacaagacttcaggtcactgggcacactaccgtgatgacatgttcccaccaatggacatgggtgatggcgaaatgcttgaacttcgtccaatgaactgtccttcacatattcaaatttataagcaccacattcgttcataccgtgacttgccacttcgtgttgctgaacttggtatgatgcacagatatgaaaagtcaggcgctttgtcaggccttcaacgtgtacgtgaaatgactttgaatgatggccacacttttgttgccttggatcaagttcaaactgaattcgctaagattttgaagttaatcatggacgtatacaaggacttcgatattactgattactacttcagactttcataccgtgatccaaagaatactgacaagtactttgcaaatgacgaaatgtgggaaagaagtcaaaagatgcttaagggtgctatggatgaccttggccttgactatgttgaagctgaaggtgaagcagcattctacggtcctaagcttgatattcaaactaagactgctttgggtaatgacgaaactatgtcaactatccaacttgacttcatgcttccagaaagatttggcttaacttacgttggtcaagatggtgaagaacaccgtccagttatgattcaccgtggtattgttggtactatggaaagattcattgcttaccttactgaaatttacaagggtgcattcccaacttggcttgctccagttcaagttaaaattatcccagttaaccttgatgctcatggtgaatatgcagaaaaggttcgtcaagaacttgctaagcgtggcttcagagcagaagttgatactcgtaacgaaaagatgggttacaagattcgtgaatcacaaacccaaaaggtaccttacactttggtgttaggcgacgaagaaatgaagaacggtagcgtaaacgtacgtcgttacggtactgacgaagaaatttctaagagccttactgattttattaatgaaattgatgcagatgttaagtcatactcaagagaaaattaattaatataattaaaaaataaaataaaaaaacgtatgctatgccaggtctaattaagatggctttattgcatacgtttttttggtaaagctaatgtaattgattttttacgtttgtaagtaagaagtaaaagaactgtcatcccctttaacttttatgaaatattttaatgaaataatgaaaataggagttatataaggaaaggtgataaacttgaaaaataagctcattatatttatgacaactgcgctattcatgttagctattattgtaatgggtcaaaatagagtagatgctgcatcctggggagctaagaatttatttactacaccaaaggaaactcgcggaacatggtactataagcaagaaggcaaaataaagaagcttaaaattacaacgcatacatttaataaaatcaaattatataaaatgttgagcagtaatcaagcgattaagtggactaaaaaattagctaaaactgataaaaagtcggggtataaattagctcaaaaagttggtacctctcaatacgaagctactgattttaaattttataaaacagcaggttttgctgccaatggttggctttctagtgatagagctgattcaggacacacttatgttgctataaagaaaaaagataaaagtaataatgataaagtagatgcactgcggagactgtaaaatagtttgtgtaaggatgaataattccttaaatttatttctttaaacattagaaaaaggggttcctttctcgtatgattggtttgaacaaaaaaacacatacagaaagaagaactccttcatgaatgattttaccaaaaatatagcacaagctctattcaatccagacaaaataaacgatttattgcgcaaagagctacaacaggctgttaataacttgctagaagctgaattgactgcctttctgggctatgatccctatgccagaaatggctggaatactggcaattctagaaatggtgcttatttccgcaaggttgatacccagtttggaccaattgaagtgcaagtgcctcgagatcgcaacagccagtttcatcagcacacgctgcctgactacaagcagcactctgatgttttggaaagcacgattatcaagctctactccaaaggcgtaactaccagagaaatcgctgacttgattgagaaaatgtatggcagtcattatagtccagcccaagtatcaaatatttccaagcagatgctccccaaggttgaggcttatcacaagcgcaagctaagcgacaagtttttctgtgtctatttggatgcgacataccttcctttgcgccgagaaacgtttgagcgtgaagcagtctatattgccattggcattaaacctaatggacataaagaagtcattgactactgcattgcgcctagtgagaacattgaagtctggacagagatgcttcaaaacatgaagtccagaggcttgaagcaagttgagctctttctttctgatggtgttgttggcatgaaagcggccttgaccaggacttatcctaaagctcattttcaacgctgcctggttcatgtcatgcgcaatatctgtgctaaagtctgggtggatgaccgcgaaaagatcatgaacgaattcaagcagatacatcaacagacaagccaaaaagaagctgcagctgtcttgcatgaattttatgcaaaatggaataaagcttatagccatgttatcaaaggtttgagggaaattgagcccgatctgctggtcttctacaattatcccaaacaaatcagagcttcaatttattcaaccaacatgattgaatcctttaacaacgtcatcaagcgtaaagctaagcctaaggcagaatttccaactgaacagtcgcttgatgtatttattggcatccaggcaatgagctacaatgaccgctatttcaaccgaattcataaaggctttggtcaggttcaggacaccttagaatcctactttgattaaataaataattaaaaaatcaatttacgagaaagatctatttacacaaaagatttgacagtttcgcactgcgagtaggaaatggagcagataattcatttttatattattgttataagagcaaaaaattaatcaaataagttacccggatttaaaattgaagtgcaacactaattgttaaacaaaaaggccatgaagacctaaacttgaagtgaccaaaaatcaagaaaggaagatcttcatgaccaactcaaattctagcatttccaagcattatcatcaattgaacagcgaacaacgtggacaaattcaagctctgcttgattctggcataacctcctgcactgctatcgctcaagaagtaggctgtcataaatcaactatcagccgtgaaattagacgaggcagtgtcctgcaaagagacagcagctatgtcttgtatgagcactattacgctgatactgcacaaatttatcatgaaaagcgccgcagaaactgctataagtgtaatccactgcaacactatgccgtttttttcagaatgctaagcagacgctttaaagccaaatttgatgccactagcattgatgaattcgttggtgaatttcacaggattatgccaaattatccatgtcctagcacgcccactgtctatcgttatattgatcaaggattgctggatataagcaatatcgacctgccaatgaagcttaaaagacgcagaaacaaacgccatcatagtcatggtggccatgctccgcataaaaagaatcttggcaattcgattgaacagcggcctaaagaagttgaaaacagaaaagttcccctgcactgggaaggcgatttggttaaaggcgtcagacgtaaaaatcaacctgccttaatgacactgactgaaagaaccactcgttttgaggttgttatcaaaattcctgactatcgggccagtacttgtcaaagactgcttcaaaaggagattgacagacatcctaattggtttaaatcaattacgtttgacaatggttctgagtttgcggatatgaccaaaatcaaaggatgtcagatctactttgctcatccatattctccttgggaaagaggcacaaatgagaactgcaatggacttctgcgtcaattcttccctaagggcaaaagcatgaaagataagtcagctgcttatgttcaacaggcaactgatgccattaaccgcaaacatcgtcgaatcctccaatatcacacagcagaagaactcttcaagcaatacgttccttcatagcctaactgttgcacttaatttgacaattcaggatcaaataagttataataattttattgatgtgttcaactacatttttatatttttgcactgaaatcttaattcagtgcttttttcataaggattagactaaataagatgataatacgccagcgaaaaaattatttaacttctcaatttttatctaagattagtgccgatgggactttaaatattgaaaatttaattgtcctgacttgtgcaatttttattgcaagtattggactaaatgttaattcaacagctactattattggcgcaatgttgatttctcctctgatgggaccactactagcaattggcacaggtcttgctttatatgatgttcacttactgcgtaaaggaacaatttcattattagcagaaattattatcagtttagctgcatctacaatttattttcatttttctcctttgacttatgctagtcaagagattattgcacgaacttcaccaacaatctgggatgcgatgattgcgttttttggaggggtcgctggaataatcggagctcgcaaaaaagaagcaaataatattgtacctggtgtagcgattgcaacagccttaatgccaccggcttgtacgatagggtattcaattgcggcaggtaatcttaaatattttttaggatcaagctatttatttttgattaactgtgttttcataattttgactgcattcatgggtgtaaaaattatgaagtggttaagttattctactaagcaatctaagttgtttttcttgcacaagccgacctttaaagagtttgtgataattttagtagtaattattttaattattcctagtatcttgtcagctaatcagatggtgaataaaactctagtagatcaaaatgttcaaaatcttgttgttaatgaattaggcaatgttaatttaattaaggaaaatgttgatacgcaaggaaaaataattaatcttacagtttcaggcgataaaattaacgctaagaaaattcaagcggctaaagcaaacttaacaaaatatgacctgaaaggctattcactgaatattgtacaagtagctcaggttaatcccaatgcagaaaatcaattagatcgacaagtaaataatattattaatcagcgtcagcatgaacaagaacaagctgatgaaaaacgtcaacaagaacaagaaaaacgtaatcaaaaaattcgcaaactgtcatctgcaatatcttctgttactgcagttagtgataataaaaataagcaaattactttgatagagttaaaaaagccgctatctaagaagagaaaaaacgccttagtaagacaaataaaagataaatatccaaatattaatttagtggaatttgttcaagaaaatattaaaaattagaagaaactgtcaaattttttgtgtaaatagatttttctcgtagattgattttttaatcttttatttaatcaaagtagaattctaaggtatcctgaacctgaccaaagcctttgtggattcgattgaaatagcgttcgttgtagctcattgcttgaatgccaataaaagtatcaagcgactgttcatttgaaaactctgctttaggtttagctttacgcttgataacgttgttaaaggattcgatcatattggtggagtaaattgaaaccctgatctgcttaggatagctgtaaaagaccagcagatcaggttcaatctctttgagatttctgatgacatggttgtacgctctgttccacttgtcatagaaggcgtgcaagactttgatcgcagcttctttatttggctgttgatggatttgcttgaattcattcatgatattttcgcgatcatctacgcgtactttagcgcagatattgcgcatgacatgtaccagacagcgttgaaaatgagctttgggatatgtcttttccagtaccgtcttcatgcccacaacgccatctgaaagaaagagctcaacctgttctagaccgcgagacttcatgtcttgaagcatttccgtccaattctcgacgttttcgctgggagcaatgcggttaatcgatgacttccttgtggccattaggcttgatgccaatggcaatataaactgcttcacgatcaaaggttatgcgacgcaaagtaatgtaagttgcgtccaaataaatacagaagaacttatcgctaagcttgcgttgatgataggcttcaacttttggaatcatctgcttggagatgttagatacctgagctgggctgtagtgactgccgtacatcttttcaattaaatcggctatttctctggtggttacgcctttggaatatagcttgataatcatgctttccaagacatcggagtgctgcctgtagtcaggcagcgtgtgctgatgaaacatgccgttgcggtccctaggcacctgaatttcaatctcgccaaattgcgtatcaactttacggaaataagcaccattgcgtgaattgcctgtattccagccagctctggcataaggatcatagcctaaaaacgcagtcagttcagcttccaataagtcattaactgcttgctggagttctttgcgcaataaatcgtttattttgtcttgattgaatagagcttgtgccatatttttggtaaaatcattcatgaaggagttcttctttccgtatgtgttttttgttcaaaccaatcatacgagaaaggaactcctttttctaatgtttaaagaaataaatttaaggaatcattcatccttacacaaactattttacggtctcattatatctgtatattaatgcacaaatgctgttatatcaacgattagatacttcgctttataataaacagtgttattataaagatgccgagagggatagaggcaataaagaattagaatcgaaaggtgatatatatgttagatgttttaaataacaaagtagaattaagcaacgtacattttgcagaacacaaattagcaattgaagatgctaaaacaatgttagaaaacgaaggttggattgctactaagtaaaaagtgttgataattatgaaattaaaaacagaaaatgagacgcacgataaagtacctcataactgctataaattagctagtagttatgagtcgttttttattttttgcttgttatctattgatttgtagctaattctatatgacaatgatatctaaattattgaactataataaaaatccgttattttaatttggtctaagttgctatatattcaaaaaaatcgttaaatttttattatttatttggcggaatatgatatgaagaaacgtttcaaattagctgctatttttgtggctgcaatgttcgcagccgcacccgttgttggtatggcagaaacatcaactactgtttcagctgatgctgacatcatgcaacaatacacttttaatgactcagttttggactttactcctactttaaaggtttatattgctaagggtcacaaatttaccaccagtaaagaaactgcttacaaggcaaaataattaggattgattccgaaaatatagagctgttagatttaccgtggtctagcagcttttttgatgcaaaaaaataccactcaccgttaaatttagaccattcacctgaatttaataatttaacgaaaataagcaggtatactaataatcaatcaaggagggatgcaattgaaagttaaattgaatatcgatccaagtttaccagaagaaaaagctgaattttggttaaagaaaatgactgctagatttgaacggattactaaagagttgaattcggagcaggattttctttggtgctatctagatggggatgcctatgaaattaatttttctcaaatctatgcaattcaaatagaaaatgaaaaaacaatgatttgtactcaaaatcaaaaatatgtttataggggcagattgtatcaagtacaaagtgttctacctaacgattttataatgatttctagaggtgctattgttaattatcattttattgatcatctagaaattataaatacaggcaatattgatgcgcttttggagaatggactaagagtacaagtttctcgtagaagaataaaggatttaaaagagaggctaggattatgaaaaatattaaagatcttttatataacggtctgattagtggactgattggtattggtatcggtacgatctggatggctatggacttcttgttttcactaaatggtcaaaatcctgcaacagcgaagatatatttgaaaacctttcttttttggacgattatttcttttctcattggtattttcttttatctagctagctggatttttaatagtgaaaaatggtcattgaaaaaacaaatttttattaatttcttcgtctgttttgttgcctggttcttgttaaacctcctaattgataattttagtatttcactaaagatggttattagagtaacagttgattttattattatgtacgctattgcatacggtggatattttttacatttatggaacactgttagacgaataaatgcaaagttaaaggaaaaatagaataccataattaaaaaatgaaagaggtacccttgcatgactttattatctgtaaataatatttcaaaaacatatcaaaaagcacataaaaaggcggtatctgatgtttcatttaatgttgatagtggtgatattgttgccttcttaggtcctaatggtgcaggaaaaactacaacattaaaaatgattcttaatttagttagtcctgataaaggaacggttgtattcgacggaaaagatgtaactcacaacaatctctttttattgaaaaacactggcgttttattagaaggatctagaaatatgtattgggccttatcaccaatggaaaattttgtttattggggtggccaacgtggtttaagcaagaaagaggcagaaaaaagaggagaaactttcctcaaacagtttggtctgttggataagaaatacacctctattaccagattgagtagaggtatgcagcaagttgtgggaatttgctgtgctatgattgccgaaccaaagcttttaattttagatgagccaactttaggtttggatcttaatgctactcaaataatgattaagagtctgaatatgttatccgccaatggagtagggattctagttactacacatcaaatggaatttgctcaagagatagctaataaaattttattaatcaatcatggtaaacttgtcttttctaatagtataaaagatagtttgaagaagctgaataaacaagaaatttttgaagtgcatttcacccaagaacttaccgcctcagaaaaagaggatatacttgcaagctgtgaacttacaaagaagactgacggagtttatcgtttgggtgttaaaccgcaagcatctctttcacaagtacttaaattattgagtgaattaccaataagtagtatacaaactgtgactagaggattagatgaaatttttaagtactacacggagaaggaaaaatgataagttttaaagctgaattttggcgtcaattctatttatataagagatacctcttcaattatatttcagaatttttcttattaattttaatgtttatggctattttttggggcggtagccttgtaggaggtggcgttttaggaaaatcattgaatgccctagtagttggctatgttttgtggagtttaattgaaaacactattagccaaatgggctaagtgtataattttttacggtaagttgaataaataattaaaaaagcccaagtcctttgaatttggacttgagctcaaacaaaaagaccagtagtctgatgttaagaacaaaaaacacattagaagctggtcttttatgaattcaattgtaactgaaatcgcaaatattataaagtctgaagataattatattaagcgtgaaagaaaaataatctgtttcttcttaaacctgattaaggaaatcatggccttggctttagctaaagttgatgatgaaatgattaccaaggttaaagcacagggctatcagattgataagaagaatgagcgctcaatcaatatggcttttggcgaagttaggtatgtcagaagaagatatgtctgcccaggcaaacaagcaaggtatcccttggatgaattaatgggctttgacaaatacaagcgctacagtattttagcagtcaaaaacatcttagaagtaagcagcgttgccacttatcgcaatactgctctagcagtcaattgcctgtctggctttaatattagccatatgcaggtgggcaatttggtaaaaatggccgggaaaaatattaaagcgggccaagaagcagattcaagatatgatgccgcaggcactaagaaaaaggtcccagttttgtatcttgaaggcgatggcgtggtgatcaaaggcactaaaagccggttggaatttcatcgctatcaggtctgtgaaggcattgtcaatataagcaagaaacgcagaaagcgaatcaatgccaaggaatttgtttctttaagccgacttgatgcgctgaacgaagccaaggagtacctggccaatacttatgatctttctgatactgtaattcttagcaacgccgatggcggtgctggatatgccaaaacagacttcgatgacattgtagggctatgcaagcgtcatgagcatttcttggatgtctttcacctaaataagaaaatcaaagaaaggctatattttgcgcctgacctgcaaggcaagctgatttctgctttggaatacaaatacagctatgacaaagttaaaactatcctaaccactgcagaaagccgactaattgatgaattgaataccgagctcaatcatgattatctggggcgcctaaggaattatattgatcgtcattgggacgatattaagccgtttaagaaacgaaaactgactgtgactaaagccattggctgctgcgagagcaaccaccgcaagtatacctaccgtgttaaggggcaaggcaagaaatggtcaaaatctggagcagaaggcatgcttaggatcttaagctgcatcaagaatcgagagctggaattttggcttagcagcgagtttgaagattcagaaataactgtattgactgaacaggaattaaaagcagcggcccgtgacagcttaaagaagcgtcatgaagttcatttaggcatccagcatggcgcattaaccgcacaggtagctggcaatagttatttaagcaagctaagcagaaatttaagtcatataaatatttaagaaattaaggttagactaatggtttaaaggctaccgcaaaaacattgacacttacccaaatgggatcaacagtgatgaataatgccaaaagtggtattttagaacaacaatatcttatgccaatttcttctagaagattatttttaaataaaagtattgcaaatattgttgtggcattcgtccaagcaattttaattctgatagcagtaatggcaatttctgatcactggattagttttccagtaataatgattgttccatttatattagctttactaactacagtgggattaggctatttaattgttagcttagttttacgttttaaaagaattggcagtaccttagtgatttttcaatatatttacttaggtatactactagttaattttgaaaactactccaatcttacaaaatgcttatcttgtttattgccaatttgtccaatggttagttggatgagattagcagttaacaatcgaccatacaatttagcgttttatttaagcgaatctatctttaataccgtattatggttgattattggattgctagtatttaatttagctgataaatatgtaaagaaaaatgggactttatctttttattgattttagttgctaataaattcattcatccctgaaaagtgattcttgcccacaaaaatttcaaggaataacttctacttatgcattgttctgtggtaggaacgctgtaaagtttgtgtctgcagcttgggtaaataataacgatcttcatgtttaaaaatagggcaaaaattgctctatttttagctcccattagaattttccgtggcataattgacgtataaatttgaaagggagatataaaaaatgaagaaaaaagttttatcatttattgccgcttttttagttgttttaggtttggctagcgttcatgcaaacacagcaaatgctgctagttagggtgctaccaaacttttcaccacacctaagaatacgcgtggtgtttggtaacacaaagaagctggtaaagttattagaactaaaattactgcacatactattaacggcctcaaggtttataaggtattaaagggtaaagaagcagataagtgggataaaaagttaactgctgccgatgaaaaggctaactacaaattagctgacaaagtttctagctcacaatttgaagcttatacctttaaattccacggtattacggatttcaacgcaaacggctggcttgctggtagcggcgacggctactactatgctcctatgaagaagaccgttaagggtaagaaagttaatgctttgcgtgtcggcggcggtgctggcaactactttatcagctacgcttacaaggataagaaattagcgtaaattgcaataataaattgaacacttaagctgcttgatagattttgtctaattctctttcaaagatttcatctggtgtgtgatatgccaatagttttcttggcaatgaattacaccaggtttcaatatcaatgatttcttgaagagaatagttattgatgtagtcacctttaggaatgaatctgcgaataaggccattgtgtctttcaacagtgcctttatcacaagaagtatacggatgagcgtaatagactaaagtgttagatactttctctaagttggatagatccgcaaactctgagccattgtcagttgtaatcgttttaaaaatttcattccagtgtttctatattgactgtgcaaggattgaaaagctgacattacactgttagccgttttatccggaatacgtatgatcaagaactctcgactcattcgttcagacaaagttagcagcacttgatcgtctctagtcttatgtcctaagactaggtcacattcccagtggccaaactcttttcggtcttaaatcactttagggcgctcttcaatgcttcgacctagtttctttttgtttttacggacacgatgaattttaatgttacgctttaatttttcgggtaaatcagagtttctgatagccaacaagccttggtctacatagttatacaacgttctagtacagactgtttattcgctgctaaattttcctatagccagacagcgattggcgcatacatcaagcgaccaattattttcaaagaagtgcttaatgacatacttaataaagtcattcttctttaagaaatctgacttgcgaccgcagcggtgacgatccaagtggtaaacttcattaccatgttttgctttatatcgcttttgcttgccattataaagcaaaactgtgccacgcttaacttcataactgatcgtagaaggagaacagccaatttcacgggcaatagctctaagagagaagccatccttgatacgagtttaaataataactcgctcttctagtgataaatactttcccttttcgtgcttaggcatgatagaatgtaaagagtccatttgtgacctcgtttctgaatgttttgtggtaattacattttatcaaacaggtccaaatggactttttatttttctaaagtgttcaatttgattttacaatcggcgaaatagaaaatatgttaattcataagaaaattatttttcaaataaaggcactttcttttgtgatttaacttcaaaaagacctttatcagagatttttagactaggagaaacaagtaaagacaaagtagagaaagacataatttcgtttgtatttttatagcccaattctacgagatttttacgtatattaccaatttgttctcctaaaatcttcattggttgattgcttacaactccaccaattggaagaggagcattggctgcaatcttttcacctctggcgactatataaccaccttgctgattaattaattgatgttgaatgtcaatcatgccatctatatttgttcccattaccatcaaattatggtgatcgtgagcccaggttgcccctacagcaccatcaccaataatgccacgatcaactaggcctaagctaaatttaccatcatttaaaccatatctttcttggacaataattaaagctaaatttgcactttgccaatcaacgatatgattatgtacagctagccttttttgaatatgatttgtaaaagtaccgacaggatttatttgaatgacatttgctgtaactgagccattatcaacaagatttgttttaagtaataggtcttgtttagttaatttaggagctttcacactagtagttagactattaggtgaaaaatcatcttgagaagtatttttgatagtctcttttgcggatattccatttttatagacatcagctattgagagttcttctaaattatccagaatggagaaatcagcaactcttcctggtgcaattgcaccacgatcccataatcccatatgtcttgcaggaatataggtagaaatataaatggcgtcttctggcttcatccccatattgattgcttttttaactaataaatttaagtgaccttttaacaaagtatcaggcattgaatcatcagtaactaaggctacatgttcaaaatatttattatcaataatagtattgatgacatctggatgcatggattttaattgaacttcaacaaacatcccgtttcttatcttttcattgactaaatctctagtttgttgagtatgatcagtagtaacaccggcatataaaattttagctaaatcttcaccatgataagcaggggtatggccttcaattggcatagtaggtttagttttatgacaagtattaattatgtccttaattagagtgtccttgtcagaagtcatatctttaaagttcatgacttcacctaagcaaataaagcgtggatctttaagtaattcttttacttcaggcacaccaattttaccgccagttgtttccatttgaggattggttgaaggaacagaagaagggatgccgaagaaaatatcaattggcgaatcttcattaatgaaatcttttaatccattaataccggcgacattagtaacctcatgatcatcagcaataatagtagtcgtgccatattttagaattgtttcacccattattttaggtgtagtcattgagctatcaatatgcatatgggcatctacaaaaccagggattaaatatttaccttgtagatcgatgactttttttgcttttaaattaggtaattctttattaatccaatagaatttgccatttttaatacttacttgaacatcttgaaattttcgtaaatatacattaaaaacatgagcatttttgataattaagtctacctcagtcatttaaaatcctccataaaagataaggagctgaatctacaattcagctccttatagggaataaacatcaattatttattcataatcttattccatcttgaaatccagttagacatatgtgaatttacaaagaagaaattaatagtttttgctcttttagcaactgagccataagttttgtttgctgcttctgcaggtgttaatttaacttgagtgtttacaggagcgttgttcaaagatttaagacctgctactttcttttgaattttttcgcttaatctaaagttgatgtatttgtatgcagctgctgaatttttactattctttaaaatagagacattatcgtagttagcatatgtaccagacttaggaacgatgtattttaagtttggattagttgcttgaagcataccaacagcataatcaccaactacagcagcttcaatttcaccagatttaaacatgttacttaaatctgaactttgggtgtaagttttgacaacattaggttttaattctttcattgccttaaatgctgcatttccgttgtctttagttacactagtaccagcatagtcaccagcaatatataacattgcggggccaaaagtagttgtcatatcaggtacagcaatcttatttttaagtttagatgaccataagtccttccaagaattaatattaactttctttggattatagataatacccaaactgtttacggtataaggaactgtattagtttctttagctagtttttgttctgattttgataaatatttgaaattggaaatcttagagaagtctaacttcttaaataacttctttttatcgccagtaacagcattgttttgagcaagttcaattacatcaacacctgtattagggttatgttcaatttgagtaagtcttgttgcactatcaccaaattgagtttttactttaactgatgattgtttagcaaaaggatttaaaacatcgttccgcatttgtttggtagataaaccaaaggttgaaacagttaaatttcctccgttagaagatgattgtgatgaacatgcagttgtaccaaatgcaactgaaccaactaataaaaaacttgcagctaataaaccaacttttttaaaattcatttttattcctttctttacaattggttatctagacaacggatgaagatgcttggagggcaaataaagctgaactttatctcctgagctacgcatcgatttcctagactcttcaacagtgaagtctccgagactagtacttaccttatatttaaagctctgacctaaatactcaagactagtgattgttccatcaatcaaattattagacggattttcttctgaattaatcaaaatattttcgggtctaatagttaataccttagcttgaatattattttcatcagttaagaaaacaagatctttacttttaatttggcgatcattaataatttcatcaacattgatgaaattatcataaccgatgaatctagcaacatattctgaactagggtggtgaaagatgttttcaggagtatcatattgatcaattttgccatctttcatgattaatactttatcggaaatagcgaagcattctctttgatcatgagtaacaaaaagaactgtcatttttagcttttgctgcaattctctaatttcgctacgcattttaattcttaattttgcgtctaaattactcaagggttcatccattagtaataattgtggattgactaccaatgcacgtgctaaagaaactctttgttgttgaccaccagataattctttaggatagcgagaagctaatttagacaagccggttatttttaaaatttgatcgactcttttttgaatgtcacttttagacatctttttcatttttaatccgaaagctacattattaaagacggtcatatgtgggaataaagcgtaactttggaaaaccattccaaagtttcttttgtaaactggtacttttccaacatcttcaccatcaactaaaacttgtccgtctgttgctggaattaaacctgctatgattcttaaagtggttgttttaccgcaacctgagggtcctagaatagatactaaatcaccgttttttacggaaaacgaaatatcttttaatactttggttttaccgttatatgattttgctaaatcttttacttctaaaattgccaatttaattgttcctatcagtaagtttatttagaccaactagtttttcagttaaaagcataattaatgctgtaaaaatcattagaactacagaaatagcagaaacagttggatcatagttgttttgtaaatagttcaaaattgctggtggcagcattgtaattgatggtccattcatgaacaatgaaattggaatattattaaatgaattaataaaacacatcataaaggctgctacaatacttgctttaatgttaggtaaaacgattaagaagaatcctttctgaggtgaacatccacaaacccaagctgcttcttcaatatttttatccattagtaacatacttgctgtaactagtcttattacataaggtaggcataataaaaagtgaccaataattagactaggcataacaggtagtctaagagtaacgacagcagcttgatataaggcaaagccaattacaatttctggaattagagtagggcttaagaagaaagagtgaaaccaagacttatgaacgatgttgaatcttgttaaagcataaactgcagggataccaattattaatgccgaaagactagcaataatggcaacgaacaaacttgattcaaatccactgataaaatctggttgctgaaaaatattggcataccaggataaagtaaaacctttaattggtagagaaattgaatcctgattattaaatgaagtaataattactaaaagtaggagactgtaaaatagtttgtgtaaggatgaataattccttaaatttatttctttaaacattagaaaaaggagttcctttctcgtatgattggtttgaacaaaaaaacacatacagaaagaagaactccttcatgaatgattttaccaaaaatatagcacaagctctattcaatccagacaaaataaacgatttattgcgcaaagagctacaacaggctgttaataacttgctagaagctgaattgactgcctttctgggctatgatccctatgccagaaatggctggaatactggcaattctagaaatggtgcttatttccgcaaggttgatacccagtttggaccaattgaagtgcaagtgcctcgagatcgcaacggccagtttcatcagcacacgctgcctgactacaagcagcactctgatgttttggaaagcacgattatcaagctctactccaaaggcgtaactaccagagaaatcgctgacttgattgagaaaatgtatggcagtcattatagtccagcccaagtatcaaatatttccaagcagatgctccccaaggttgaggcttatcacaagcgcaagctaagcgacaagtttttctgtgtctatttggatgcgacataccttcctttgcgccgagaaacgtttgagcgtgaagcagtctatattgccattggcattaaacctaatggacataaagaagtcattgactactgcattgcgcctagtgagaacattgaagtctggacagagatgcttcaaaacatgaagtccagaggcttgaagcaagttgagctctttctttctgatggtgttgttggcatgaaagcggccttgaccaggacttatcctaaagctcattttcaacgctgcttggttcatgtcatgcgcaatatctgtgctaaagtccgggtggatgaccgcgaaaagatcatgaacgaattcaaacaggtgcatcaacagacaaacaaagaagaagccacagctgtcctgcatgacttctataccaaatggggcaaggtttacagccatgttatcagaagcttgaaagacatagaaccagatctgctggtcttttataactatcccaagcagatcagagcttcaatttattcgactaacatgattgaatcatttaacaatgtgatcaagcgcaaagctaagcctaaggcagagtttccaactgaacagtcgcttgatgcttttattggcattcaggcaatgagctacaatgaccgttatttcaatcgaattcataaatgctttggtcaggttcaggacaccttagaatcctactttgattaaataaataattaaaaaatcaatttacgagaaagatctatttacacaaaagatttgacagtttcaaaagtagaggaaacatcaataatatcaggataataatagaaataattgctaaagttttatttttacgattaagcattaatattaggtctcctatccaaagcgcgacttgcttttctcattaatatcattgataaagcagagataataatcagaactattgcaataacacttgcatttttccagttacctaatgtcatggcttgttggtaaatcaaggcagacattactaaatttttattacctcccaaaatttgtggggtagtatatgctgtcatcgcacctgcaaagaccaaaatgcatcctgttaaaatccctgagactaattgtggtattacaatttttatcaaattaacccatggattggcgcctaatacagcagcagcttcttctgcttcaatgtttagctcagaaatactaccaactaatgaaataatcataatcgggagaaataaataagctgaaccgatgataattgccgtatcagtataaagaatgtttaatggagaattaattaaatgaatagacatcagaaatttatttagaataccgttacgacctaaaataatgatccatgcaaagtttctgacaactgcattcgttaacattggaaaaagaatgataattgttaaaattgatcttactttgctcttttgacgagcaatccaaagtgaaattggaattccaagaattaaaacaatgatcatagtgagtaaagcaattttaaatgttctaccaattacatgaagattgtacgtgttttttagaaattcagtgtataggtgcaaaaatcctttagaatcttgaaatgttggtatagcaatctgaattaatggaaagaatgcaaaaatcaagacactaataaatgccggaaatagcagccaaaaactggattttattttcatattgttcgtattcctccttatcttgtcttagaataatttaaatgtaaaaataagtcaatacaaaatatgaattaaaataataacatttgtgttaattgtatgcgtattgtattatttatgaatataaatagatttatttataaatttatcttcttgaaaatacgaacattaccaaaaaggaagtggagttcttaatgaaaaagccagttattattagtacagatccaggaatagatgacgcagttgcattagcaatatgtcttttttcgcctgcaattgaagttaaaagtattattgcaactaatggcaatgttaatgcgcaacaagctttaataaatatattgaaattggagaaatttttcggtaaaagtattcctgtagtaaaaggggtagagcgttcattagtcaaacaatctattcgagctaaagaaatacatggtaaatcaggaatggacggatatgattttccaaatcctagttttgaattggtggatcatggcatatcaccggttgccatacataaaatagttgcagcttcttctgaaaaagtaactcttattggaattgcaccacttactgattacgctctatatgttcgtttatacccagatgatataaaaaatattaaggaactaattattatgggcggagcaatgggtagaggtaattatggtatctattctgaattcaatattgcatctgatcctgaagctgcaaaaatcatttttgaaagtggattaaaaattagagtagcgcctttagaattaggtgcacaagctaaaattatgcctgaagtaagtaatcaaatacgacagttaggaaaagctggtgatatgttttacgacttatttaagaaatttcgaggtggcagttttcaaactggccttaaaatttatgatgcacttgcagcaggcgtacttttaaatccgcaaatgtttaaatttaaaaatacacatgtagaaattgatgttcaaaccggttatacatatggtgcttcattgatggattttaaaaataagctagatcttccaaataatgctgaaatagcagtgtctgtagatccagaaattttttctaaatggtttgtagaagctttatcaaaaacaagataaaaaagtcaattaattgtcaacaattaattgacggataatggttaagcgagtatactactactagttgagaacaagaagaagcacccgcttctcgcctaagttaagtaaacctctaggctgattgataatttctgttgattaaaggcgggtatgattcttataacccgcctttttcttgtcctcaaattaacacggaggtgaacagttataccaagaagtttaatcttaaacgacagaattcgcgctcgcgaagttcgtttaattgatgaagatggtcagcaagttggtgtgatgagtaaaagtgatgccttacgtcgtgcaagcgatgcaggtcttgacttagctctgatttctccaaatgctaagccacctgtagcacgtatcatggattacgggaagtaccgctttgaacaacaaaagaagcttaaggaagcccgtaagaattccaagacagtcagtgtcaaagaaattcgtttgagtccaactattgaaggtaacgacttcgaaactaaacttaagcacgttcgtaagttcatttctaaagaaggagctaaggttcgcgtctcaattcgttttagaggtcgtgccatcactcacaaggaattaggtcaacaagtacttgaaaaaatggccgaagtaacctcagacattgctaatgtaattagtaagcctaagatggaaggtcgttcaatgttcttgatgcttgcacctaagagtgataaggacaaaaagaaaaagtagttaattggaggaaatagaaatatgccaaagatgaaaacacaccgcgcttctgctaagcgttttaagagaactgcaaatggtggtttaaagcgtcaccacgcatttactggtcaccgtttccacggtaagacaaagaagcaacgtcgtcacttgagaaaagctgctatggtttcaaagagtgatatgaagcgtatcaagcaaatggttgctcaaatgcactaatacttgttcttaattaagacagactatagtaggaggaattttaaatgccaagagttaaaggtggaacagtaacacgtcaacgtcgtaagaagatcatgaagcttgccaagggttaccgtggcgcaaagcacatgcaatttaaggctgcaagcactcaattattcgtttcatacaagtacgcattccgcgaccgtagaagacgtaagagtgaattcagaaagttatggattgctcgtattaacgcagctgcaagacaaaacgacatctcatattctaagttaatgcacggcttgaagttggctggtgttgacatgaaccgtaagatgttagctgatattgcttacaacgactcaaagacttttgcacaattagcagaaactgctaagaaagctttgaactaataacaaaagaaataagctagggaaattttcctagcttatttttttatctatttttgaattaatgctcgtaatctaattttttcatctggcgtagtaaaggccgcgtcaaccgcgttgagataaagagtggtttcttcttcaggagtcaaggcggtcttttcttcaagcagttggtattcatgcggtaaattggtattggaaacgatcatatcatcagaatttagcgtgactttcattcccatgtgcaataatttttttattgggtaagaatcaatctgatcaaaagctttggtgttcatatttgaagtggcgcaacattccaatatgatttggtgatcaatcagatattgggtaagtgctggatcttcagtgcagcgaatgccatggccgatccgtttcgcgccaatttttaatgcttgacggattgaatcaggtcccgcagcctcaccagcatggatggtataaggaaggtgtaattcttgggcacgattgaaaaaatgctggtagttaatgtgagggatcgggccttccgcaccagctaggtcaaggccaacaacgccatgacctaaaaattctttcgctagctcaaccgtttccatgttttctttttcattgtgggcgaagcgcatcaaacagagaattaaaccagcgtgtaattcaggctgatctttgtctgctttttgtttttgataaaacttcgtaataccgctgactgctgcagcgattacttgtctttgcgttaaaccatttttagtatgtaattgcggtgcaaagcggatctcggcgtagactagaccttgttgttttaattcgcaaagaagatcaaacacaatcatctccagatcatgctttgtcttcattaactggttaggtaagtcaaacttttccaaaaattgttccaagctagcgcaagaattatcaactgacaattcttgccgcaatttttgatcagttaactgtggcatgtgatgttcctgcattaacttcttaacagtagcaactgggacagaaccgtcgaggtgaaggtgtaaatcgatgaattttctcatggtgatcctttctgttgattgatgattttgcttaaattgtttagtattgtaacactttttcatcagaaaaaaacaaaaatttctaaagcaaacccatttttgatatgatataaggtgataaaaaatggaggaaattaacagttaaaagatagacaagatacaaagatctgttcagaaatataaaacatagaagcaggtcaaaaactaaaaatttaatattttgttcgcttgtatttatttcactctttgctaaatttatgtttgtattggaggtgaaacaaatgatcaaggctcaagtagtcgaattaaaacctaacaagaccatgcaacaagagctggataagctttgtgattatcgcagatattgctggaatcaagctttagccacttggcaagacatgtatgaagcacgaaccttagataaggataataatcccagtccaaatgagcgcagaatacgtgatgagctagtcgataataaggcagactggcagtttgctctgtctgctagatgcttgcaattagcagtcaaagatttggctaatgcttggaagaatttctttgataaggcacagcctgattgggggaaaccacatttcaaatcaaagaaggccccgcgacaaggctttaagactgaccgggctaaagtggttaatggtaagctacgcttagacaagcccagaggcattaaaacctggttcgatattccaacatatgaagctttaaaaatgaagcaaattaaagttgctagtgtctttagagaaagaggacattattatgccgctctttcttatgaagaagaaactttggtaaagcctagaacaggtagaaagacagctgttgatgttaatgtgggacatttcaactacactgggggcaaaatcaatgttttgccatcaagattgcaaaaactatacaagcgcattaagcattatcagagaatgctggctaagaaaagacgggctaatggcaagttagctggccaaagcaataattacgtgcaagtgagaaccaaactgcaacgtgattatcgtaaagtagccaacattcaaaacgatcttttgcaaaaattcactacaaaattggttaataattatgatcaaatagtgattgaagacctagccgttaaacaaatgatgatgacgcacgtcgcttcaaaaggcatgcagagatcattattcagtaagtttagacagatattgacttataaatgtgagtggtatggcaaagaattaatcttggctgataaaacatatccatcaacccaaagatgtgctaattgtggttatgttaaaaaaggtgatgaaaaaatcactttgcaaggcaaccaaaaacatcacactaagcacaatgagtatatttgttatgaatgcggttatactaatgatcgtgatgataatgcagtgttaaatcttttagctttagcaaaataatgaaaacggggctggctaagcccttaagctgcaagagttagtcaatgcgattactcctagattggaatattggaatactaatgatgacagcagtaaataaagcgaagaaaggaaggactatatttctttctgatatgtaaaaaaatatacattcttctacatatttctatgttttatatagcagtgttgatatgctttttagaccaaaatatacaattgatacgatttacaatctggacccccagaagttgaatgaaatggacattaaggcggttttttcagacctagataatacattgctcgcctggaataaatttgaaactgccaaagaaatggataattttaatcaaaagttagccaaggcgggaatcactctcgtggtcatttctaacaataatgctcaaagagtgggcaaggtacttgatccttaccatatcgaatttgtcgctaagtcacgtaagccattgccatttgcgatcaccaagaagcgcgaagcaatgcatttgcaaaaagatcaggttatgatggttggcgaccaactaatcactgacatgcaagcagggaatttggccggcgtgaagactgttctagttaagccattagttgaaactgataagtggaatacgagaatcaatcgtttctttgaaaaaattatctttttcttcctgggtttatcacatcgagtaacatttaagaaggagctatcaaatggatgaggatattatttgtatcggctgcggtgccaagctgcaatccgatgatcctgaaaaagcaggttatctgccaaaaagtgcactagataaggcaaagcaagaagaaaatgcggatgtttattgtcaacgttgcttcagattgcgccattataacgaaatcatgccagttgatttgaacaacgatgattttttagctttgcttaactctttaggacaaaagaaagctttaattgttaatgtagttgacttatttgatttttcaaattctttgctatcatcattgaagcgttttgttggaaataatgattttattttagttggtaataaatttgatctatttcctaaaaactctaagcaaagtaagattaaggattggatgagacaagaagctaaccgaatggggctttatcctaaggaaatcttcttggtttcagctaaaaagaagttgaacttggaagatttgatcgcttatattaataagcaatcgcaagacaaagatgtctattttgtagggacaactaatgttggtaagtcaactttaatcaatgccattattgacatgatgggtgatattcaagacctgatcaccgcttcacgctttcctggaactactttagacaaaattgaaattcctctagaaaatggtcactttttgattgatacgcccgggatcatgaccgagaatcaattggctacgcacttaaatgctaaggatttggagctggtctcacctaagaagcctttaaagccagctacttaccaattattgcctggtaatactttattcttagctggtttgggacggattgattatctcaagggcgaatcgactagctttactgtttacgttgctcgtggaatgtatattcaccgtactaagacagctaatgcggatgacttttataaaaagcataaaggtgaattgttatccccaccagctgcagatgatgaaatggcaccactaaagggtcaagaatttagaacggaatataagagtgaccttttatttggtggaattggttttgtgactgtacccaagggatgcgttgttaagacttacacaccagatgggattggtttaggtattcgtcgtgcattgatttagaggtttgcatatggttaatccaaaatgtattgaaaaaatgccaactgctaaagttgaagcagaattggaacaagaacaaggtaaaggtcgtcagattgggattatgggtggtacctttaatccggtgcatattgcgcacttggtagcggcagagcaagcaatgactaagttgaagctggatgaggtctggtttattccggataatattccaccgcataaaaatgctccgctgacttctgctaaagatcgggcaacgatgcttgatttagctacgcgcgataatcctaactttagggtaaaactattggaattgttccgaggcggcgtttcttatactgtggatactatgcgttatctcaaggaaaaagcacctcagaatgactattatttgattatgggcagtgatcaggttaacagtttccatacttggaaggaagctccgaccctggctaaactagtaacattggtcggaattcgtcgtccaggttatccacaagatccgcaatatcccatgatttgggttgacgcaccagatattcgcctaagttcgactgctattcgtcgcagtgtcgcaactggcacttcaattcgttacttggtaccagaagccgtcagagaatatattgaagaaaaggggctttaccttgacgaaactaatttttaaaaatacttattcaccattctctagtgaacaaattgttgctaaagaaaaggcaaacatgaagaaaaaacgttttgaacattgtgttcgtgttagtgaaactgcacgtaagttggctaagttaaatggatatgatgaagaaaaagcagccttagctggctttgttcatgattatgccaagcaggtaccggtagaagagtatcgtaaggtaattaaggaacaggattttgatccagatttgcttaattggaatcgggccatctggcatggcattgtggggattttctttattgaacgtgatttaaaaattagggatcctgagattttaactgccgtacgtcgtcatacgactggtgatactaagatgactacattagataaaattatctttgtagctgattttattgaacccggacgagattttccaggagttgaagaagcgcgcaaagttgcttatgctagtcttgatgaaggggtaggctatgaattgcagcacaccttagagtttttaattgaaaataaaaataaagtatatcctcgtactttagaagcatacaatgtatggggaattaagtaataaaaaggagaaaaatattgactagtcaagaaattttagattttactacccaagcaattagtgaccgtcatggtgaagatactgaagcttacgatatgcgtggaatcagtattttagctgattactatgttattaccagtgcaggctctaatcgtcaattacatgcgatcgttaactcaattgttgatgcggctcacgaaaacaactacactgactaccgtattgaaggtaccagagattctaactggcttttgctcgatttaggtgatgttgtagtcaacgtctttactaaggaagcacgtgaattttataacttggaaaagctatgggctaacggtaagcaagttgaattgaaggaagattaagcaatgagtgttgttgggattattgcggaatttaatcctttccatagtggacatgagttcttgctaaatcaagcacgcttggttgctggtaatgatccaattgtggtgctcatgtctggtaactacgtgcaacgtggtgagatggcgattatgagcaagtgggagcgggctaaggtggctttgcaatctggtgccgatttggtatttgaaacaccattttcaacggcagtagaaccagctgatctttttgctctcggaaacattgaacaacttgctaaattaggcgtaactgatttagtctttggtgtagaagatgctaacctgaattttgcttatttgggtaaaagaattgcggaaattccccagaatcacatggattttagagattatagccaaacttattcaacacaatacaaccaaatggtagcgcatgaagtaggctatgaagttaatcagccaaatgctattttggggttagcgtattcagtagctaatcataatttaggttcaccattaaatctgcatccggtcaaccgaattggagcaggacatgatgaccttttacaaagagaaaaagttgtccaaagtgctagtgcgattcgaaatttattattgcatggtgaagatacaaaaaatttaaagtattggatgcctaaagcagaagcaatggtgttagctgagcagaaaatttatcctaattggaatttgctatatccatttttgaagtatcaaattgaatcatcttcagttgaagaattgcgtcatatttatcaaatgagcgaagggcttgaatataagatgaaacaagagattcatttagcccgcgattttacagaatttttgcggcatatcaagtccaagcgttatacttattcccgtttgcgccgtttgagcttatatactttgcttaatgtcactcaggatgatatattggctagctttaatcatgagtctttgatgctcttaggctttagtaaggtaggtcgcaaatatttaaagcaacagcgcaaggaatttcagacagaaatcgtctctaaagttgataaaagaagtgctaagaacggctctttagctttacaagttagggtagaccgtttatttgaacaaataatgggcgttgatcaaaactttggtcgacggccaatcgaggtgtaaaaatgttagaacttagtttttctaggattcaaaattccaaggaaccattaactcacattgaacgtgatttggaaatgcgtccagaattttttaagcgtagtaaagatctactaattgatgcgaaaaatgtaaaagtgagcggtgacttgttctatcaagaaccatttgtgactggcagttttcatgtggccgctgatctggttgtgccatcaagcagaagccttaagccggtaaactatcatgaagattttacttttactgaaaactaccttgatcgtaagccaaccaaggaagaattggaagaaaacgatactattgtacaagttgagaatgaccaaattgacttgcaaacagcggtagaagataatattttactccatattccaactactattttgactcctgaagaaaaagaaaagaatattttcccagagggtcaaggttgggaagttgtttctgaaacctcttttgaagaaggcaagaagaaccaagttaacccagcttttgctaaattgaaggtcttgcttgatgggcaagataatgataaggacaataaaaataagtaataaatgtaattgaaaaatatggtggacaatcaaagaaaatttttactttgattgttttttaatcttgtgttagaagcacttttaaagtatcctttaattataaaagcattttttaattaatttattagtattagaaaaccaaattgatctacgaggaaatgaattaacatggcaaaaattctaattattgaagatgaaaagaacttatctcgctttgtcgagcttgaattgcaacatgaaaattacgagactgttgttgagaataatggtcgtaagggattagaagatgcattgagtcaagactttgatgctatcttgcttgacttgatgttacctgatttaaatgggttggaaattgcacgtcgtgttcgtcaagttaagactacgccaattatcatgatgactgcacgtgattcagtgatcgaccgtgtttctggtttggatcatggcgctgacgattatattgttaagccttttgcaattgaagaacttttagctcgtcttcgcgcagtgttacgtcgcgttaaaatcgaaaaggacgcatcaaaggttactgttgctaagcaaaagattgtaaaatttaaagatttgacaattgaaactgctaaccgaattgtgcaccgtggtgatggcaaggcaatcgatttaactaaacgcgaatacaacttattaatgaccttgattgaaaataagaacaacgtagttagtcgtgatcaattattaaacaagatctggggtccagaatctaatatcgaaactaacgtagttgaagtttatgtacgttatttacgtaataagattgacgctccaggtcaaccatcttacattaagacggttcgtggtaccggttatatggtaagagatgaagatgatgatcaagaataaagacgaggaaaaagaggccaagcactcatccctaattgtgcgatgggttagtatcgttgcattaacgattacggtctcttttgtcatattttcagttgttgcctatcaaattgttagtcatcaatcgatggaacagcaacaagagacatctaataatgtagttaccacgatggaccggacattaagttctattcaagatgagctagagatctcaaatgtaattcctgctctgtcaccgtctaccaggcgtattttgaggggcggtcctgctattagcaaaaaagatacagagaataaagcatttagtgatagcctgatttcatcgatttcgaatccagatattaatgtagcagtttacaacaaacatgatgaaattgtttttactaatggtaattctgcacctaagctaaaagaatttgccggcaaccaacttgaagaagtagtaaaccgaaaaaaaggcaaaatgcttttaacctaccagaaaatctattctgaggtaaatggcaaattaactggctatgtagtggtttctaatagtatgacttattacaatagcttgatgagtaatttgcttcattggatggtaattatttcactgattgcaataattatcttcattgcaatttcttatattttggttgttaatgtagttcggccaattaagacgatgtctaaggtggctaaggaagttaatgctgatcctaatagtgaggctagaattaaggaactacatcgagatgatgagttagaagaattagctacttcgattaatcaaatgctagaccggatgcaaggttacattgagcaacaaaagcaatttgttggtgatgtctcacatgaattaaggacaccagtggcagtaattgaagggcatttgaacctgcttgaaagatggggcaaggatgatccgcagattttggatgaatcaattaaggcttcgttgcaagaagctgatcggatgaaacatttaattcaggaaatgcttgatttaactcgagccgagcaaatcgatgttcaatatccgtatgaagtaagtgatgttaatgaaatcatccgcagagtggtcgctgatatggcaatggttcatcctgacttcaagattcagctggatgaggatgatttacctgatgatacagagattcaaatgtatcacggtcatttggaacagttgctagtaattttgatcgataatgggattaaatattcgactgatcgcaagcagattaatgtttcagctggtgtaactaagaagaatgttaatattattgtgcaagactttggtgaggggatttctgaagaagatcaaaagaaaatcttcaatcgcttctatcgtgtggataaggctagaacccgtgaaaaaggtggcaatggtttaggtctatcgattgcacaaaaattagttgctagttataacggaacaattagtgttgaatctgttgagggtcagggcagccagtttaaattgaagttccctcggttgactaagaaaaaagccgctaagttaagaaaattaaatgagaagaaacaaatgcctaagagcaatcttgaggcataaacaaaatcctattaaatcaaggtttgggtaccaagatttaataggactttttttctctagaggcttaggtattagaaaataagaaataaaatgcttcgaaaataattataattgttcccggatttaaaattgaagtgcaacactaagtgttaaacaaaaaggccatgaagacctaaacttgaagtgacgaaaaatcaagaaaggaagatcttcatgaccaattcaaattctagcatttctaagcactatcatcaattaaccagcgtacaacgtggacaaattcaagcaatgctggattccggcataacttcccgtactgttatcgctcaagaagttggctgccataagtcgacaatcagtcgcgaaatcaaacgcggaagcgtcctgcaaagagacagcagctatttattgtatgagcactattacgctgatactgcacagatttattatgagaagcgtcgcaaaaactgctatcagcgcaatccattgaagcattatgctgtctttttgagaatgctctccagacgctttaaagctaaatttgatgccaccagcatcgatgagttcgttggtgaattccaaaggactatgccaggctacccttgtcccagcacaccaaccgtctatcgctatattgatcagggcttgctggacataagcaatattgatctgcctatgaagctcaaaagacgcaggaacaagcgtcatcacagccatggcggtcacgctttgcacaagaagcatcttggcaattccattgaacagcgtcctaaggaggttgaagacagaaaagctccgctgcactgggaaggagatctggttaaaggcgtcagacgcaagaatcagcctgctttaatgactttgactgaaagaaccacacgctttgaagtagttatcaagattcctgactatcgggcaagcacatgccaaaggctgcttcaaaaggagattgacagacatcctgcctggtttaaatcaatcacgtttgacaatggctctgagtttgcggatatgaccaagatcaagggctgccagatttactttgctcacccatattctccatgggaaaggggcaccaatgagaactgcaatggtcttttgcgtcaattcttccctaagggcaagagcatgaaagacaagtcaaaagcttatgttcaacaggcaactgatgccattaaccacaaatatcgccgaatcctccaatatcacacagcagaggaactcttcaagcaatatatctcttcataacctaactgttgcacttaatttgacaattcaggaattataattgttattaatttaagcgatttaattagctaaaaatatttaaacttaagtcatgtggtaataagtcaaatgaaaggcgatgatatttgttctttttgatcataaatttgagtatatgaaactaagccttggtaaaggttgatttttttaatgttaaacttttgtttacttttaaatttagaccaatttttgaaattaagacctcggtgtcctgtacagtttgtcatctttgagcaatttaaagataactcgtactaattttcttgcagttaatgtgcaagcacgtttatgcggcgagtagacagcttcatcatacttcttttggtaatattttttgaaaacaggatcatgtaatcttgctagattggcagcttcaatcaagtaatatcttagatatctgtttccagtcctggccattggagtatgttcgttgctgtgatctcccgattgatattgattccaggttaggccggcatacttagccagctgttcttctttatcaaagcgatcgatacttccgatctcagcgataataccagctgtataggttttgccaataccgggaattgattccagaattttgctttctggtaatgcatcaacgatacgatcaattgctttttctagatctttaatagattcattaaagctttgaatcatgttgtaatgaacagaaagcactgcatcaattgaatcagtcattactttgcctaagcgatatgaacctctaacagctttcttaattgctttagccaaggtatctggatcggaaaagcgtcctctgcctttaacctgtaagtaagaaattaagtcttcggtaggcatatccgcgatctcatccagagttttactatcggttacaatagacatcattgtagcaccgaaaagaggagtattaatcttatctttatcgacagtgattagtttattaacccgataatataaagcttcaatgaagtgctgtttggtacgagtcagttcttgaactaattcatatctggtacgcgttaaacgctctaaagcaagatagttgtcttgtctggcaatgcttactcgataatgtccaaagcttagatacaaagcaatgtaataagcatcgagaggatcagttttactttcttcaaagactttatgaaacctgctggtttctttggggttaattacatcagtctctacattgagcttttgtaaatcttcgtcattttggaaaaagtaagcaggatgaaaactgtaaatagatgtagcttccatgccaataatgatttgatcatagtgtttattttgagctagatctaaaatttgttttttcagttcactagcaccataaagatcattgacaaagctatcgttaattaagcgtttgttttgatcttctgaatcaagtgcaacgacctgtaaatctttagaactaacatcaataccgacaaataatttcattggaaatggcctcctttctttcaaatttctgatcatagattttgatcttcacatgttaacccctaattacagttcttaagttcaatctcgccagtataagtattcactggttgcttctttgaaagctgcacctaatcccaattgctcaaggactagcaaaaagaagcaatcaatacagcatgtgagttagagcataaaggaactgtctgggtggcagacttataaagcagacaaaactgcaggaggtgataacctagaccagttgaccaaagccaatgacaattagaggctaacatgtgaagatcaaaaagcaaatactaatttgattaattatcacaatatgactaattacaatttatataatacgagggatgtgacataatgaaagaacgcattttttcaaggaaattctggcagaaagtttttaactatcaattgattatctggtttctcttgatgattagttatactttttctcagcggaataatcatttttattttataggggatttgttcaatctagcttttagtacggcgatcatgggattgaacttttacgtgcaatttaaaaaggattccagcaagactaatactcaaattgttcgctggctgaccatagtaatttttcctttcaatttttgccaaatttggcatatcactgggaattttttgctaaaaaacctgccggctatcgagattctattagtattactgctatgggcggtttatattttcttgctagttccaattgcagttgtacatgttggaccgattaaaaattggtttttacgcttgctaactatttactttcttgatattcagtacggtgatgcacaaaatttagcaataaatccagattttcgctggcttcattcacttacctatcaaggtgtaatcgcagctattgctttattaacgatgacttgtttcttagttaaagcttggggctatcacttcaatccaaacttaaaatttattaaaagtccaagctttcagaagaagatcttgctggctttattgatcatggcaaccattgatttgttttacaatgagtttatcaactatgataaagcaatttggacagtattctttggtgttgacattggttcatttaaattctcaattcctaatttaactgcagccattgagcccggaattttggaagaaaccgaacgctatttattgatcgtaatttttttagctggttttaatagatttccaaagtatcgcatccctgttgcaatctatggttcagcaattttgtttggccttagtcatttaagtaatttttgctggcatggagaaagttttactgcaacaattgcacaagttattggcgtaatggggagcgcctttatctgggcagaattgtatctctatacaggaaaactatggttgccgatgatctatcactttttaatggattatatttctgatttgcaatctggttggaattctgctggctggtcttggaatggcgaaatcactgattatatttatactgtattaattgttggcgttccattgctattctcaatttggatgcttttcggtaaaagaaggcaagtaatggaagataatgcagatttgattttggatctaaacggtaggcaaagcatgatttagcagtgacttatattaaagggactataatgtatatgcaagggtaaaataattaagagaggtcataaattatgaaacttaagagaattgtattaagtattgtggctggaactgcgcttttggttcctgcagctttagcgggtcaaaatcaattaacaccggtagttcgggcaagtactctgaagaataagattacaactgttaagagctataccaatccaactttgtataataagaatggtaaagagctaggtagccaagatcggataaattttaagaaaccgatcagtttttatgggcaacctattgttattcagggacccagggtcaatgcttttattaatcttaatgggatgccacaagctattgttaatggtgaaacctatgcagatttaggtgatggtggttatgtcaacatgaaatcggttggtagctataactggaataataatgagatcggaattattaaaaacacctatatttacaatagcaagggtaatcgtttatcaacttatcgcggtggcaaggcttatttaactaaaggtagcaagattaaatatgctggtaaaagttggactacttatcctgattcatattttaatttaggtgatgggacgtatttaaagtctaataacgttaataccatgaatggcaaaggcgttttgaagctgaatgctaacactactatttataataagaatggcaagcgtattagctttaatggacaacaggtttttcctaaatactcaattataaattatgctggtaagcgtcgcactaagacacaaactgacgattactattacacaaactgacgattactattacacaaacttaagtggtagtaaatcatatgcaattaagaattataagattaaaggtcaagactattattacattggcagaggtgcttatatcaaggcaatgaatgttggtcgcatcaatggcaatccggtatttcgtgatggcggtgcaactacgattgttccgcagacagatttgtacatctataattctaaattaaagaaaaccaaacaatctgttaagaaaggacaaaagattagagctttagatccagttgttcttggtagtggtgatattgcccaactattttacagaattaagggaacatctaactatgtttcctggggtgattatagtgagtatggttttgaagatgatgagcacgtgggctacttcaactttcgtgttagattaaatcctgttaaaactattgaaaatgccgctacacgggccgctgaagaatcagattaattgggagtgaagacgttatccatttggatagcgtttttattggattatgaaaaagaattaatctgaagtgtctaggaaaactctaaaaattgaaaactcctactaaatcttggcataataagccttgatatagtaggagttttgttttgagttaaagccaaaaatcgattaaaaatagctttttctcagatacaaacttaattttttctatagagatctttcttcaaacaaatgaccataggaacttaaaattctagctaaatccgtccaagtaagactgatagttttggtattatcattgggatggacgccaacataattattttcctccatggccgcttggtctacaatcaagggaatagtgttgctagaatcattgagtaagttaaagggtgaaaccgtaccagatttaaccttgagtttttcctcaagttcatcttctgaagcaaaagttagactaggagaaagtaattcactttgtgcttttttccagtcaacttttttattctcaggcaacatgagtaaataataattttttccgttacgcgatttaataaaaagagtcttacatttagtaaaatcttcatttttcaagtatttatctgcttctttagttgtataaactgctggatgagaaaaaacttggtaactaatatcgtgatcatctaaaagttgtaatatttcttgagtatgcatattttcctcctaataaaaaagtcaggattttactcctgactgataactatttacgcttttgcttacctttattacggttacgtaagtcttggtgtagttctttcttagcttcagttgtagccttgctttgaccgctattggagttaaacaaagcatccactttttctttagtaacaacagtttcaattggcttatcttttaattcatcggcaatatgcttcttaacactaggtgtaaggacaaaggtaacgattacttgttggacaatcattactaagttaccagcagcccagtaaagagctaaggcaccagagaaggataaactgaagaacaaagtcataattgggttaacaatcatcattgattgcatggtcttcttttgttcttctggaataccaattagtgagatataaccttgaataacggtaaagacagtcgcaataatggctaaaacaacagatttggaacttagagaaataccaaagaatttggattgtgccaattgaggtgaatagaataccgcttgataaattccccacataattggtaactgaataattaatggcaagcagcccattccaccagttaatgaaacttggtttttagagtaaagctctctttgccaagttgataaagtcatttgttggtcaggggtgatccccttgtgtctcattgcattttgaatcaacttcatttgcggttgcagacgagccattttttcctgttgacgtacactcttgttttgctgtactaacatcaatggcatcaagattacacgtacaactaccgtaataatcacgattccccaaccagcaccattatcgccgccaatcatgtgcgcggtttgaatcatgatattttgtaaaggtcggcctaaccattggtaaacccaaccgtaaataccgctgtgcggtgcaacatgtggatcagttgttgccccacaggcacttaatacaagagtagctactgctaataaagccagtactccagcgtatcttttaatttttttcatttaaataaatcaccacttaatttctatctaaaaatgtatgtctctaatataatacatgaaaatcatgcattttttctacacctggaaccgattcttgactaatattttgaatttgggcaaatccagatgcagtaggtagtttttcaataaagcggtcgattttatcactgtctgcttgtaaatagattgtaacggtaccatctgcattatttttaacagtgccaggaatacccatcttgttagctaatgccatggttgaccaacgaaagccaacgccttgaactaagcctgaacaaattaattttcttgtttccatttttatctcccttatttaaattaagttcaactttgattttagcataatcaaaatagattatcagttataatagattttgaatacaaaaaggagaaaaatatgcaacaaattagttcagttaataatgcaacgattaagaaattagcgaagttaaagcaaaagaaataccgcgatgatgaaggcttatatttaattgaaggctttcacttatttgaagaagcacttaaagctggtaaaaaatatcagtatatcttaggtactgaagaagcacttgatcaagcagatagtgaatatgaagttaatttaagtgggaagaatgtcgtattaattaacaaagcgattgctcgccacttaagttcgactaagaattctcaagaaatttttatggtattaaaaattgatcaaccaaaagaatttccgtttaattatggcaagtgggtgctgcttgataacttggctgatcctggtaatgtggggacgattatcagaactgctgatgctgctggttttgatggggtagttctttcaccagagagcgctgacctgtataatcctaaaacgcaacgtgccatgcaaggaagtcaattccatatcgatttgattaagcgtgatctagctgatgtgatcaccgattttcaggatgcagctattccggtttatgcatcgctgcttgatcgttctgctaagcaattgcctgatttcgaaaaagtgccacaacttgccttaattattgggaacgaggcgcatggcataagcaaaacaattgcttctttagctgatgaaaagctttatattccaattaaaggacaagctgaatcgcttaatgccgctgttgcagcagggatcatgatctatcactttgcttagcacttgtaattagtaagtagatctactataataattttagtaatactaaaaagtattttatataatagtatttttactggaattatataatacggagggacttacctatgcaagaagttaaagagaaaaaggacgcagctccttgtaaaccagaagattatgaattatgtggtcattttgttagtgcgtttaagattattggcaaaaaatggaatggcttaatcatcagttctttgtgtgatacacaagatatgcgctttaaggacttggcacgaactgtcgaggcttgcagcgaccgtgtcttagttgaacgtttgaaggaacttgaaaaggacgatattgttaaaagaagcgtcgatcaaagtaccggtattatttcatatggtttgactgaaaaaggtgcggaacttaagcctgtttttgatcaagtacataattgggcagataaatgggcttaagctattgacattaagtaagcatagaagtatattacttattgtaagttgcttatttaaaataagattaggtgaaaggagtacgaaaatgaaatctttaagtatgatgaatgttaatactgactgttgttcttgtgtatctaacattatttttaatactcaagaactcagttttcgtatttccgaatagctttaatccagagatcaaaaagatttacgttagctgaaaagacgtagatcttttttatattgtttaaagagacctatgggagtaggtctttttttgtatgattgggggatttttaatgaattggacagttatccagcaagctctaccaatatttgcgcgcggctttgaactgaccttatggctttcattgattggcattgttggctcaattatcgtgggcattattgtcagcttagtacaatattttaaactaccagtactaagtcaaatttcaacggcatatgtcgagctagctagaaatacaccgcttttgattcaacttttctttttgtattatgcttttccagtaattggcttaaaaatgtcggcagaagtctgcggcattatcggtttgattttcttaggcggcgcatatatggctgaaggctttactggtggctttaatggtgtgaatcctagtcaaattagtagcggtaaggccttgggaatgaataattttcaactagctcgttatgtggtttttccacaaggattcagcttaagtatgccagcattaacggctaatattattttcttaattaaggaaacctcaatcttttcagtaattgcaataccagaattgactaacactgctcttgacttaattggaatgtactatcggtcaaatgaatacttactgatgttagtagttgcatatgcaattattttgattccggtgattttattattaacttggcttgaaaggagagtacggtatgcttcattcggggattaatgttttatttgaagggagtaactttgctcgcttgatggcaggactatggacttcaatttggattgcggctttgtcattaattatcggcttagctgtgggtacaatttttggtatcttaagaacgctcaaaaatcgaccgattcgctttgttttgcgcctatacctggaattctttaggatcgtgccaactgtagttttactttacttagtttattacatcttgcctagaagtttgcacgttaactggccagcaacttggatggcagtcttagccttttcaatgtgggtagccgctgaatttagcgatatcgttcgtggagcactagaatcagttcctaagacgcagcgtgaatccggcttagcgttggggctaaatcgcttgcagctatttcgctatgtattattgactcaagcggtcaaattagaattgccagcaacgatcaatttggctactagagtaattaagaccacttctttgttaatgattatcaacattatggaagtgatcaatgttggtcaacaaattatcgaagctaataaccaacaatatccagcaggcgttttctgggtatatggttttatctttatcttgtactttattttagattatccattatctgcatgggcaaagcgtttaaccgctaaaaattaggtgaatgaaatgacagaagaagttttaagagtagaacatttaaataaattttatggtaaacatcagaccttgtttgatattaattttagtttgaacaaaggtgaagtattgacgttattaggaccatctggttcaggtaagagtaccttgcttagaaccttaaatggcctagaagaatatgaagacggcgcgatttatttccatggcaaaaagattaatcctagtccaaaggaatggcaattattgcggcagaagattggcatggtttttcagagttatgatctgttcccaaatttgaccgtaatggaaaatattttgctggcaccggtgaaagtgcaaaagcgtgatgaagacgaggttaaagaagaagcagtcaaattactaaaacaagttggcttgtcggaatatggggatgcgtatccgcgtgaattatctggtgggcaaaagcaaagagtagcgattgtacgagctttagttatgcatcccgaagtaatgctttttgatgaaattaccgcttcacttgaccctgaaatggtgcgtggcgtgttagatattatgcaaagattatctgatgatgagcatatgacgatgatcattgtaacgcacgagatgaactttgctgctagaattgcagataaagtattgtttttagaggatggaaaaatcttagaggatacaccaggcaaggaattctttgccaaaccgaaaacgaagcgagcacaagaattcttagaaagtatggatttttaggtgtgaacaatggcaaaaaagatttttaactggattatggctatcctattcgtagtagtagtcttggttgcaggctatattggcattagccggccaggcatcaatggcactgcttcaggggatagatggaatagtgaaaataatgtttcttcaattaaaaggcgtggttatttaagaattgccgtttttggtgatttgccgccatatggctgggttaattcacaaggtaagcgtgttggttatgacgtgcgtctagcgcgcagagtagctaaggatttgggtgttaaacccaagtttattcaggtaaatgccaataaccgaattgataccttgaattcaaataaggcggatattgttctagctaacttcaccttaacgcctgaacgtaaaagtgtggctagttggaccaaaccatacatgaaggtatcagtcggggtaatttcaccaaagtcagctcctgtaactaatgctaagcagctaaagggcaagagtgtaattgtgactaaaggtacgacagcggaaaattactttactaagcaaaaaggcgttaacttgctgaagtttgattccaagacccagcagtttaacgcaattaaaaacggccgtggcgcagctttagccgatgataattcttatttgtatgcttgggttaagcgtaatcctaagtttactgttggaattaaaactattggccctaaccaatacatctctggtgcggtgaagaagggcaacaagtcactgcaaaaatggatggatcgtgaaattactaagctgaaccgtgagagcttctttacttatgattataataaagaattgaagccatactttggtaaggaaatcagacctagtgacattgttttgccgcagggaaaataaaaaacttgcaagaaacaagtaaaagaaatatgataatagttaattactaagatcaagactagtaacagattatttttctaaagagagtcttctttcaaaagctgcaagagaagatagaaaaagtctgtgaatttcatcttgggagtaggatctaatcaattccggtatttcaccgttaacgaaaacttaagtgtgggcgttgctacgtccaaactagggtggtaccgcgacgcttcgtccctattggagacggggctttttttgttttgaaaggaaagatttaatggacttatttgataagttaaaagagctccatgaagaagggcttaagcaaatcaacaaggctaaagacgaaaaaactttgaatgatgtcagagttgaacttgttggtcgtaagggcgaattaactaagattttgcactcaatgcgtgaagttgcgccagaaaatagacgtgaagttggtcaaaaggttaacgaattacgtgacttgtttaatgctcaattagatgaagctaaagaaaacattgttcatgcaatgttagttaagaagcttgaagatgaaaagattgatgttactttaccaggtcgtgaagcacatcttggttcaaagcacccaatcaacattattttagatgatcttgaaagctactttattggtatgggctatcaagtagttcaaggtccagaaattgaaactgatcactactgctttgaaatgatgaatatccctaaggatcacccagctcgtgacatgcaagctactttctacattgatgatgaagatttgcttagaagtcagacctcaggtgatcaagctagagtcctagaaaagcacgacttctcaaagggtccacttaagatggtgggaccaggtaaggtataccgccgtgatgacgatgatgcgactcactcacaccaattcatgcaaatggaaggcttggttattgacaagaacgtaactatgagtgatttaaagggtactttggaattaattgccaagcacgtttttggccaagatcgcgaaacccgtcttcgtccaagttacttcccattcactgaaccatcagttgaaatggatgtatcttgctttaactgtaatggtaaaggctgccctatttgtaaatacactggctggattgaagtattaggtgctggtatggttcaccctaatgttttggaaaatgcaggtgttgactcaagcgtttacggcggttttgccttcggtgttggtcttgatcgtttcgctattttgaaatacggtatcgatgatattcgtgacttctacaccaatgacgtacgtttcttagaacaattccgtaaggaggaaagataattaatgttagtttcatacaattggctaaaagattttcttgatttagatggtcaagatccatacgaattagcagaagaaattactcgtagcggggttgaaattccagaccgtgttcatccaatggatggcttgaagaagttagttgtcggccgtgtccttgattgtgaaggcgttgaaggtactcacttgcacttaactcacgttgatgttggtgaaaacgaacctttgcaaattgtctgtggtgcacctaatgtagctgcaggtgaagatgtgattgttgctcttcatggcgctcgtattgctggcaatgaaaagattaagaagggcaaaatccgtggcatggaaagttacggcatgatctgtggtttacaagaaatcggctttagcgatagcgtggtaccacaagaatttgtcgatggtatttacgtattcccagcagatgccgaagttaaacctggtcaagatgtatatgaagcacttggcatggatgattacattttgaacttcgacattactcctaaccgtgctgatactttaggcatggaaggtgccgcttatgaagtcggtgctattatcgaccaaaagccaaaggttgaagaaaaggttgtcttaaaagaagatggtccagcctggacagattcactcgatgttaaagttgatgaaaagcttacacctaagttttacttacgtaagctcgagaatattaagattcaagactcaccactttggttgcagcgtcgtctttggaatgcaggcattcgtccaattaacaatgtagttgacgttactaactatatcatgctgttaactggtcaaccaatgcatgcttatgacgctaagacttttgctaacggaaagtttgaagtaagacttgctaataagggtgagaagcttactttgcttaatgaaaaagaagttgaccttgaccctaaagatatcatcattaccgatggtaaaaagccagtaatgatggctggtgtcatgggtggacttgattcagaaatcacttcagaaactacagatgtcattcttgaatcagccatctttgatccaactttagtcagaaaggcagcacttcgtcacgctaaccggaccgaagcttcaagtcgctatgaaaaaggcgttaactgggatgccactgaaaaggcaattaacatggcagcgcttttacttagaaatgacgctgacgctactgttgatgaaggtattcttaaggcaactgaccaaaagcgtgaaccagttgtggttaaaactactgcttcatacctcaataaagtattgggcactaagttatcagttgatgaaattgtaaagatttttgaccgtctttgctttaaggtagatgttgatggtgataatttagctgtccatgtaccaaatagaagatgggatatttcaatcccagccgacttagttgaagaagtaggccggctttatggctatgacaaccttgaatctactcaacctgttttgccagaaactcatggtggctactcagaaaaagaagaaatgatgcgccgcatgaaggcaattgttgaaggacaaggcttgatggaagctatttcttactccttgacttcacctgaaaaggccgttcgttacactaaggatccaaaagaattagttgaagttaaatcaccacttaactcaagccgttctgcaatgcgtgagaatttgatgactggattggtagatgctgctagttacaactttgctagaaagcaaacacaattagctttatttgaacaaggcagaacttatgaccatgatggtggtaaattcaacgagcatgaacatttagcagctatttactctggcaatacttttgcggaaaattggcaacatttaacccaaaaggtagacttctactttgttaagggacagttaaccaatttgttcaatgcaattggtattgatcctgaaaaagtggtttatgaggctaaaggcattaaggggatgcacccaactagaactgcaggaatctacattgataagcaatatgttgggatgatcggaatgattgctcacgctgtaacgattgctgataaggcacttcgtggtagcgagctttatggctacgaaattgatctcgatacaattattccaatgttaactaagggcgtaactgcagtgcctgcacctaagttcccagcaattcaacgtgacctttcacttttagttgataagccagttactaaccaagaaattgaaaacgtcattaaatctaatgctggtaagtacttaactgaacttaaggtaatcgatgtttatgctggtgctcacattgatgttggtaagaagagtattgcttacaacttaaccttcttgaacagaaaagatactttaaccgacgatgttgtcaataacgcgatggacaagattgttgctgctcttgaaaatgatcttgcgattaaagttcgttaaaggttgacattattgacgtaaattaatattattgatcagtgcaagataaagaaaattaatttctgaggagttaaaaatatgcctgaaaaatcttatccaatgactgctgaaggtaaagaaaaacttcaagcagaattaaagaacttaaaattagttaagcgtccagaagttattgaacgtatcaaggttgcacgttctttcggtgacttgtcagaaaactccgaatacgatgcagctaaggatgaacaaagtcaccttgaggatagaattgctcaagttgaagaaatgcttaagtatgcacaagttgttgatgcagaaagcgttgatcctaacgtagtttcagttggtaaaacaattacctatactgaagttggtactgatgatccagaaacttacactattgtaggtagtgatgaatcagatccattgaatggcaagatttctaacgattcaccaattgctcaagctttattgggcaaaaagaagggtgaaaccgtatcaattaccactcctggtggcaagtttgacgttgtaattaacgaagttaaagcctaataataaaaagggagggtagctatgactatcttcctttttgtttttttgaaaggattttaaaatgagaacagttggtattattggcatgggccatgttggtgcaaccgttgcctatactttatttacgcacagtatggttgacgaactgattttaattgataaaaatgaagctaaagtaaatgctgaatacaatgacttgcatgatactttggctagaaatgatagctatgttaatgtgcgaaagcaagattgggacggcttagaagatgctgacattattattaccgcttttggtgatattgcggcttcagttaagacaggcgaccgctttggtgagtttgaattaaatgcaagaaatgccaaagaagttggggcagatattaaagaatcaggctttcacggcgttttgatcaatatttctaatccatgtgatgcaattacccaaattttgcaagaaacttctggtttaacgaagaatcgcgtctttggtactggtactttccttgatactgcaagagttcaaagaataattggtgaaaaacttggtcaagatccacataacgtagaaggtttcgttttaggtgaacatggttcttcacaatttacagcctggtcaacggtaagagttaataacaagattgctttccaattgtttggtgatgaagaacaagaaaagattagtgaacaatcaaataagaattcctttattgtggctaagggaaagggctatactagctatgctattgccacttgtgctactcgtttagttcaagcagtctttagcgatgctcatctatattgtcctgtttcagtttataatcctgaatacaagacttatattggttatccagctattattggtcgcgacggcattgaggaagaaattgaattaaagcttacttctgaagaaaaagaaaagttgcaagctgctgcagataagatcaaagaacacttgaagcaattgaagaaataagtaatattcattacgcgtggtgctagttaaatcgttttagttaataaaaaagtccaattagactagactcaagttgtaagtaatttaaatagaaaagagtctgatctaattgaactatctcaagcttaatcgtttttctcaccatttacaagttagttttaatcggttaaatgtgatttgtcgctcgctgtataagctttatgcgcctgatggacttaaacatcgtaaaaatgttgatcagaccaagcttcctgatagttctatcttagcgatgctcatttggcaaactgaaattggaattgaatctcaacgaagattctgtaaattcttcgttggcttatctcattctcgttttaaccgtcgagctcgaatgctcttgcctctaattcgttgtatccgtcagggttggaatcaggaagtaaaggtaggtggagaattattgattatcgacagttttccgattccagtttgtcagcctgttcgcaattatcacgttaagatcttccgtggcatagccgatattggttataaagcgacgaaaaaaatctactattatggcttcaaagtccacgcaatagtgagtgatgatggctatctgcttgactacgcagttactaaggcgtcggtacatgatgcaaaagagacggtagaattgatgatcaatgctcatccaattaaccattatcttttaggagatgaaggctatttaggaaaagacttagcagccaagctaaagcgtatgggatacgtgctttggacaccatatcgtaaaaacatgaggggtgctaaaaagcataatgatcatcagttaatggcaattagaagaacaatcgaaagcgacttttctttgcttagctattacaatgctgagaataatcgagccaggagcttagtaggttttcaacaacggctagaaatagctattttagcttataatatggcatattgtctagaacgatttaactagcaccacgcgtattcattataaaaaataagacaggaattacatctgctgcaattcttgtcttatttttgtctactttagctttacgtcccaagctgcaatttgcttattgccatagtagcgtttataaatttttttagtcttcttaatttgatacgccttaacaacttcttgataaattttcttatttttgtcttttgtccgggcacaaatgatattgatccattgttcagaatccttatttaaaggttctacaaaaatagtctgcttatcacctaaatgagcgggaccagcaaagtcattgttaacaaccgctgcatcaacgtcatcaatgacacggctagtttgttctgatgcaacttctttaatcttgaaatggtcaggattagaggtaatatctgctactgatacaagtactttgcctttcttcaatttgattaaacctgcattttttaaaacaaacagagctcttgattcattagtaggatcgctaggaactacgatagttgctccatcgggtaatgcattaaggctatgatatttcttagaatataggcgaataggagcaatgtaggtcttaccaattgcagtgattccaccatgatttgctttattccaagcattaagaaaagcatagtgttgaaaggcattcagatcaacatcaccagatttgagggctttatcaggttgatcataaccgtcaaaacttttagtggttaaaataatgccatatttttctttaacggttttggcaacgctcttccagatagcaatatcgcctttgctggcaccaacaattccgacactaactttagtttgactactgcttttgggtgtccaaaagaaactaaaatagccagctacaataattaataagccaatgacggtgctaataataatgtgacgtcttcttctttttctcatttttatccctgccttttgaaaaaataaaaaacacccatcctgaaaaggacgagtgcttcgtgttaccacctttaattcgccaattatttgcataaccagccttcacaactatctaacaatagcttgcattgctaacgagtgcaaccccgatgctagctaaatgtcactagcataatcattctgaatccatcttcattgaatcattctttttgcttttcaccaaccagcaattctctgttaaagatttggttcaattactctattcatcaagatttttaattattgttaataatttatcatttaattttaattgtgttaaataaatttttttacttagttaaaaagttagtaacggaagaaatagtgagaaaaagtttatttttgtcgattaacaaagtagtaaatgagtgagacaaccgattcagccaacatcccaccggccatccagtacattgccatcatcattttgccggtaaaagtaaagtaggcagtaatggcgtaaacaattacccaaataattttccaaaataagttattcattcctgagcacattttgaagctcctttatttttgactagcaccagaactgctgtcaacttccatgccgcaaccttcggtatccattcctggcatccacacatcttcaggtttaatgcctctttctttagcaaaggcgtcggttaatgtcttcatatccattaacttgtatgtctttgggtgtttagggtcgaatacttcgatttgagccatcattccggcatcttcgtgttcaataatgtggcagtggtacatgaagactccagtttgtgggaattctacacgcaagcggacggtttcacctggtctgacaggaatggtgtctttgtaaccatattcatttggaaatggcttttcgccatcacgtgaaacgactgtaaagtgtgtgccgtgaatatggaatgggtgcaacataccgtgttccttagagttggtattagttacgtcccagtattcagcatgactaacttgttgcttcatatcgatccgctgcattgcgaattgcttgccgtttatcttgttgtgatcatccatagttactttacgaactggcaaatcttcagcgatttcaggaatttctggtttgaataatgtatcaggaataacactgttgtcaggtgcaaacttgtgaattctaaattcaattagtttgaaatcatcagtataaaggttaacgacatcgccatcatggtaatccttgaagtcaactacaacttgaagccgttcaccaggtgttaccaagatcttagtcattttgattggatgaggcaaaaatgaatcgtcacctgcaatttgagtcataactaggtcatcatcaaagtgcaagcgccattcacgacggttagacccacctaagaatagtaaacgaatcttttgtgttgttacatcaacataagggcgaaccgtgccgttgattaatggtgtttcaccgaagacgcccattgcatcataatcagcgcgatagtcaagttgattatctttgtggaaagtacggtcttgcaaaataactggaaactcgtcaacgccatagtttttaggaattgggagtttagcttcgttttcatctgttactactacgcccatagctaatcccatccaaacttgggcagcggtggatggacatgggtgagcatgaagccatgttaaggcagctggttgattaacagtgaattcgatttgcttttcttcacctggataaacaggggcatgacagccaccatcagtaataggaccaggaacttccatgccatgccagtgataagttgttagttctggtaaactgttttttaaggtaacgtgaactcgctggccacgttttaagaccatggttttacctaacaaaggagcgttataaccccaagtcttggtcttagctccaggcaatatttggctttcgctttcaattgattcaagagtgaaccagacatcagtatcagtttccttatccggtgcaaggactggagggacagctaatggctgagcttctacaccttgagggatgcttaatttcttgtagtggaagtggtttttgtcaaaatcttcatcttcgataaagtaattagtgtatatcttatctgtcatcttatcatcctttcgacactaacttagcatgattttttaccgttttcaaggcgcaagaacgctgttatttaaaggcttgcatgtctattataactatgtaatgaaaaatatttttactattttgtaatcgcttacacttaggtgaattatgttattttacaagatttgttgccttgctaggcttgcgtgtctccggtaaactaagcatgaagaggtgactagatgtataaaattattgcgtgtgacttagatgaaacgttgttgagcgcagatacgcatgtctcagtagaaaatagagaagcgattcaaaaagcagttgctcacggtgtaaaatttgttcctgcaactggacgaggctacgtttctgtccaaaatactttaaaggaaataggattagagcaggcagctaatgaatatgtgatttcattcaatggtgccagcattacagaaaataagaataatcgcgtgctgtattttgacggcttgcctaatgaaattgcggatcggttatatcggcatggggttgaactagatattgccatgcatgtttacactcaagatatggtatatacgtatcatatcgatgatgatgaacgtgcctatatgacgggacgacaccagtttaaagagattgaagataaagacttgtcatttttggaggggcagaaaattgccaaggtgctctatgagagtcttgataataattatttgcaccggatcgccgctgaattaggaccaattacgcaagaattggatatttcatattcatctaatcgttatttagaatttaaccgtaaaggtgtcaataaaggcgcgggactgatgaagctggctgagcagcttagggtgccgattgaagaaacaattgccattggtgataattttaatgacttgtcaatgattcaggctgctggtgtgggtgttggtgtggctaatgtcaatcctgctatgaaagagcaatgcgattacattactcaggctgataataatcatggtgcagttgccgaggcaattgatcattttatttttaacaattgaaaaaaataaaaaaataattgacagattaaaaatacatgatattattgtttacaacaaataaaaaaatgagctttgataaggaaagtaacttaagaaatgatttgcagagagtcttcggttggtggaagaagataatgatgaattaagtgaaaatcacctttgagctgaaagtgcgatattagcattttcagggtccgccctctatagcggcgacgtatcgctgattttgatagaatcagccgcacgtgcatgaggtagaatttttgtgagtattattctacgaataaataggtggtaccgcgttgaagacgccctattagatcaattgatctagtagggcgtttttttattatcataagcttgttgttaattttttgacttatgggagagataaaaatgagaaaaacattgaagcacttatttggcacgactgtagtagcacttttaggcgtaagtactttatctgcatgttcatcaagccaatctggtgctaaagcacctaaacaagaattgacctggatgactacctcagaaatccaaactatggatccttcaaagatggtagatacaactggtagtgaacaggcatctaatgtttttgaagggctcaatagactgaataaagcgggtaaagttgtatctggtgtggctactaaaactaatcagagtaaagatggtttgacctggacttttactttaagaaagaatgctaagtggtctaatggtgatccagtgaccgctgaagattttgtttattctttaagacggacacttgatcctaagacacaatcacaacagcaaaatgagtggtcaaatgtagttaatgcagatgatgttttagctgggaaaaaagctccgtcgactttaggtgttgaagctaagggtaaatatgaattggtagttcacttgaaacatcccgtaccgtattttaaagccttgtcagttggttggaatccgcaaaataaacacgtagtcgaaaagtttggcaaaaaatatgggactgcatctaagtatatggtttacaatggtccgtttgttcaaaaaggctggactggttcaagtcttaactggaagttagaaaagaatgatcaatattgggacaaagataaagttaaattgcagacggttaattatagtgtacaaaagacgccttcaactgattacaatctgtatcaggctaacaaattagatggtgcctatcttgatgttcaggcttcaaagagactgaagggtcaatctggttatacagtctataaactagatagaactgaatacttgactttcaatgtatccaagcatccagaactagctaatgtcgattttagaagagcagtttcaatggcacttaaccgaactcaattggctaaaacagttggtggtgctaataccgtagctcgaacttttgctggaccaaatgaatatgttgatggtaagaattttgaccagtatgttgaaagcaaaaatccagctaataagtatatgaattataaccctgcaggcgctaagaaactttatgatagagcattaaaagaattgggtaagaataagttgacctttaccttaatgggtgacgatgatgacgtttctaaaaaggttttagagtttgtgcaaagccagttagaagatacctttggcaaaaaagttgatgtaactgttagaagtatgccgaagactactagagttaagaaaatgctcaatggtgatttcgaggcagtctttactggattgacttcgggctatttagatcctaattcacaattgcacacaatgatgacaggacaaagttataacttcggtaaatggcctaacaaagattttgacaagtatatgaataattcagataaggaattaaatcctactaagcgattagaagatttgtataatgcagaacgtgttttaactgatcaacaaggattgacgccattattccatgatggtcaagcttggatggttcgaccaagtgttaaaaatgtagaattcttgggtggtaatttcagctttaaggatgcatctgtaagtaataattaggagaaaaataatgactaaaacagcttttgtaaattgtaatttattcgttggtaatgaagataatctagtagataatgcttggtttgtcgttgatgatgaaacaggtaaattgaccgatcaaggtaagggaaaatgcacagcagattttgacaaacaagttgaccttaaagggaaatatgtgatgagcggtttgcttaattcacatactcacatggggcttgattctgacttgaagaaaaaatttccgactactgaagcttcgactacttatgcagcactgcgggatctgcgtgaagctttacaaactggtgtgacttatgttcgtagttgtggcacatcctttgatgttgactgtaaattagtgcagatgcgcaagcagtatccttttgaaggtcctcaagtgatgccaactggaatggcaatgtcaattgtcggcggacatggtgatttcaaggtggggttaaatggagagcaaaatgctagtcatttggttaacggtccagaggacatgcgtcgggcagtgcgtgaacagtttgccaagggtgctaaaaatgttaagctgatggcaactggtggaattatgtcattaggtgatgaagttgatgatactgaactttctcttgaagaaatgaagatggcagtagaagaagctcattctaagcatatgacggtttgtgcccatgctgaggggagacgcggtattcattatgcggttgttgcaggagttgattcggtagaacatggtttttatttagatgataatgacttggctttgatgaaaaaacaaggtacatttttgtcaccaacattgactgcaggtcggacaatcgtcgttcatggaaaagatgttgtacctgagttctcataccgcaagatgtgtgcagtagttgatgacttttataatcatgtcggccatgcgatcaaggagggggtgagactggcaatggggacagacgcaggaacatatttcaatcgcttctctgatacacctaatgaattagtggaattggttagagcaggagccacaaattatccagctttaagagcaggcggtttgggtagtgccgaattgcttaaggttgatcaagaatatggttcgcttgaagttggcaaatatgcggatttcctagttttgcgggataatccactagaagatgttgctgcagtcggccaaaaagacaagcaagtttaccaacatggtttacgtaaattctaaatattttttaccacaaataaggcatcctcgtgagatttttcttgcggggatgcttgtttgtgtagttcaaattaaagtaaacattttactaaattttccagtaaaagcgaataaatataacccaaaatataaaaatagttcttgatttagtatgaattacgatgtagtatttaaaccatcaaacgtattactgatgatttgaataagtggagattgaaatgtcaagttttcaagaatactactcagaattacaggaactagcagggtatttactacacaatccagaattaggctataaggagtataaaacttctaaggcagtggaagcagaaattgctaagatttctactaatataaaaatcgaacattattgtaaaacaggacttaaggtaatgtttgataatcattgcccaaaaactattgggattattgcagaattggattcactttatcagccaggtcataaggatgctgaccctgaaacaggagcggcgcaagcttgtggtcactatactcaggtgacaacagccttggctttgataaatgaactgatgaaaaatgatcgtctcaacgagtttggcactaatttggcttttatttttactccagccgaagaatttgtagatcttaattggcgcaaaaagcataagttagctggtgattttacttactttggaggtaagcaggaagctatcaaacttggcgtatttgacgatattgattattgtgtatcagttcatgctataggtgaagattttgagcgtaggactattgaaattaattgtgatttagctggatttaattttcaatactttgacttctttggtaaggcgagtcatgcagcatttgctcctgaagagggggtaaatgcacagagtatagctaccctatttaccactgctttggccttcaaacgtcaacaattaaaaaatccaaatcaaattaggtttaatccagtgatgataggtgataatacagaatcgattaatgtaattcccgatcatgttagcatggggacagatatacgatactttgatgtcgaatatgcacagcaactaatgaagcaattcaatcaagcagcagaaggatgctccctagctttaggcggtaattttaagtcagaaacacaggttggctatttgcctttaaggtcgaatagagacatgaatgctttagtaaaaaatgtatttttaaggaatgacaagatttcagaattgattgaaaaccgaggctataccatggcagctggtgatattggtgatgtaagttatctaatgccaactattcagattggatatggtggttggaatggaaccattcatggctctgattttaaattagttgatccagtttttgtactggacatattcccggaatttatctttaacagtgttttagaaatatcaaataatcttaataaaatcaggacttatcgtagaacaaatcaggaatatcttgaacaattaaataaaatgggagcagaaaaatgaaatctttaaaaaattatggtccattaattattttagtgctattgattgacactattgcggaatttatagggatgcaggttttcaaaattggtaaaattgaagtttcaattctaccattagtattcgcagttattttagcgattattatttatttacttccattaaagccgattaagcaactctacaatgataaaagagtaaagtttgctggaaaatatatgattttaataatgttgccactaatggcacgttatggagcaaatgttgcacctaagattaatgaaattttatcagtaggttgggtatttctcattcatgagttaggtaatttaggtacaattttatttggactaccagtagctttattactaggattaagacaagaggccattggctcaacattgggattaggcagagaaggagaactagcctatattagtgaaaaatatacacttgattcaccggaaggtcgaggagtcctaggtatttacttaattggaacaatttttggttcgattgtcttctcaattttagcaccagttcttttggggatgggctttagttatcaagctgttgcgatgagttctggagtaggatcaagttctatgatgactgcagcttcttcagctttagcagctctggttcctaaacatagtgagacgattctatcatttgcggcagcaagtcagttgttaactagttttattggaacttatattatgtatttcctcgcagttcctttgcaaagattcatgtatgttcacttgactagtttgcttgataaaaagaaagaagtatacccagaacatgattagagaaaataatttttataaattaggtagagatgcattaattttattgcttagtgttagtttagttttatttgttcagtagattaagttagtaaaaaatcctaagagcaccccaattacacctgatacttttgccggcctaggtctattatggctgttttctctgattggcattattatcagtatgttaatgaaacgagttccgtggaagattgttagaggatttcccattctaggctgggtgtctatcgtttcattagttttctgtttgcttagtccatattgtgttcgtgtaattaatgcagtagattttttatcattaactacatcggtattagcctttgccggaatttcagtaactcatagattgaaggatttatcaaagatttcatggaagatcttaattgtggcattatttgtctttttcggtatgtatttcatggatactttgatttctcaaatagctcttaatttgagtggaaaatagaaaaaatatataagtgtctgggaaaaaactagcttccagatgaataaaaacgatcaagatttccttttttaagaatcttgatcgtttttttgttctctttaaaatttttaacaataaaaatcggcccttcagccaccttctttgacaatatttgttcaaattcatcatcataaaggcaattccgatatcggtttcgaccttctctttacctcgcaggtgcgttctgcgcatgccaaatacgttcttcaaatgtccgaaaactggctctacatcatattttctcatgccatagatgtgtctgccttcttcgctttggagaacttcttttgctttttcttttaaatattgccagttaggattatagcgaacttggcgctggcggccgctagctgttttagccaattgttccaattctggcgttagctggaactcgtctgcctcataaaccttaaaatcacggacctgaccagtagaacgatccttacgctggctgtaatatttgaaattgaatctgacgccatgatgatcaatgtaataatcatctttttcattgtagtaccagttgattagcttagttggatcattcttatactttttggtctgttctttttcatacatagtgtagggaataaagtacttcttgtctggatatttttcctccagcatcgaataattgtattcactgccatagccagcatcggcgacgattttgtcaaacttgtccaacacggtcatttgatccaaaaccggctccaaagttttgaaatctgtcggattaggaaagatggcataatcaactacatattgatcggtcgtgactgcttgaatattgtagccaggctttaattgaccatttttcatgtggtcttccttcatatgcataaaggtggcgtcatgatctgttttggaataactgttgcgtccggcaaagatctcttcggcttcttcatatttttgcattcttggcacataatcttttcttagccggtgcagaatcttttttagtccacgtcgcttggcttttcgaggtgaaccgccaggaatggctttgttttcctgctcaatctctttagtcagcttgttaatttctgcttcagtttcttgagctaattcctttagcccctgactagtttgaactttttctttttccatttctttgactacttctttagtaatcaattcatcataaagttcaactgcctggcctttcagcttttcatgatacttttcaaccgctttgcgccagacaaatgtatagcggttagcatcagcttcaatcttagtaccatcgataaaagcagcaccttcattgattaagccttcatcttctaacaggttagtgaagtagataaagctctttttaatcagttcattggcatggctgcttgatctaaaattattgatagtatgatatgaaatcttttgctggtcagccaagatcatcattggcagattttcttccagcatcaactcaatctttctgccagaaaaaactcttctggagtaagcaaaaagcagtattttgagcatcatggctggatgataggctgggcggcccgttttagcagtcttgcctactaaaacatcttctggaattgaatctacaaaccagctgatgacattagccaaatgattggccggaatggcaaaatctagattaagtgttaaagcagtttgacctgtgatataattcttgtacatgttagtttccacctttttgtttttattttgtgatgatttaataatatcaaggctggagctaaaagtatacaaaaagagcgttgaaacaaaaattcaacgttcttttttcatgatctgagacttagttttttcccagacacttttgaagtgtgtcgggcatgacattcatctagtccaatgaaagcttggcgtaccgcaaggtggaccgctctcgccaatcctatccaatatctatttagataaaatggacaaggaattggaacaaagaggcttgcgctttgttcgctatgtcgatgactgcaatatcttcgtcaagagtggtaagtcggctaagcgcgtgatgaagtcaattacatcatggctagaaagaaaactgttcttaaaagttaacactactaaaactaaagtagttagaccaacgaagagcaatttcctaggctttaccttctggaaaacgggcgaaaactggcaagcaaagccgggagacgaccgtaaagccaagctttatgacaagattagagaattgttgagtcgccataaagcagttgctcaacctctatcattagtctttactaagataaatcaagtggtcaaaggctggggtgcaggcgtttttggctttaacgcaaaagaagtcgcaaaaatgtggcaggaggcctttgatactccgacaagcatctccactgtgatttacgctgttattcctggcagaaagaataaagacgtggtagctgattttaaggatatttttgcttaaatagaaattttctctcaaataacaatccaaacaaaaaagacgagccaatgcccgtctttttattttcttgaaataaatttttagttaaaagttagcttttttaacgtaagtgttcttagaaatacgatagaaagtcttgccgtgtaatttaattgcgcgaccataagtgttaacgcggtgacctttcttccaaactttcttattagcacgcttgccgttcttcttgtagacataagcattgtgcttcagagtccgcttaacggccttagctttcttggcagctgtctttttagcagcagcggcatcagtttgagtcttgtcagatgtagtattggcatctttattagcagtgtcttcagcgaccttacctaaagtaatatcagccttttcgttcatggtcttgcccataacgttaagaccgaattctaagctgccagcgccttctttataagcatctgctgagaaaacatagtcaagggatgagccgtctttagcaacattttcttgcttgccggctacaccattcaatgttaggctagcaaccatcttagacatgtcttgacctttggtcattggtgctttagagccatcaacgtgaataattacttcggtaactttaccgtctttaacattaacttgagcagagttgcccaagaacatagcagcttctgatggggtagtgctgccagttttggtaatagtcatagtgatagtttgcaagtcgctgttttgactagtagcagtagttgcagcaacattagtagcaggctgatcagctgcagacactacagctgatggtgccaaaacactagcgcttgcgagtaaagcaagtgatgttaaaatgattttagtatttttttcataaaagttttctcccacgaattttaggtatcgcttacattataatcaaataaatgttataaatcaatattttttttgttattttatttttttatgagcataataaactgaataaaatatcaccttgaaaccgattgcatagttattttaagaactttataatagaaaagactaatagtaaaaagaaggatattagaatgaataaaaagttacttaagttaatcgcaagtagttcggtcgcaatgactttaatggcacctggagtggcatttatgcaaactaatccggttgtaatggccgctgaacaaagtcaaaagacagtgggaatgacggtttacaaatacagtaaaaatcaccgcagccatgctaagtcaatggctcaaggttttgtgggagataaggtgcaattaacagttagtcaaaagcatgtgactaagatgacaatccatgtcgatggtaaaaatagtccaatgggcaaggggaaaaacgtaaataagattgtaaaatccctcaagattaatggcgttagcggtaaaaaggaaaatgtttccgccgacaaatctagttttgactttgtttttgcaggaaaagctttcaaaaataatggttgggtcaagatgcaagtcactattgactttggtggtaagatgaccgaacaagcttgggtgaagtatgacaaggttagcggtttaactactagcaagaaaaagaccgacaagaagcaaaagaaggctagtaaaaagagcgtcaaaaaagttagtaagaaaagtacacacggtcagcgcggataaaaaggttcaaaatatcaattatgcggtctataaggcggatcgcagtggcgtttctgcagcaaataatttttacactcatcatgccaggattgaaaaagtaaagcagggctatgttatgaccttaaaagttgaggtaaagcatgggatggtgaccaaatttcagccggtttcactgggaattggttcaatttcaaacctgcgttttaccaaacaagctggcaaggatatctggacttatcaggtacacttcaagtcgctaaatcagttgaagaagcaggctcaggggagtctgcgcttgagcgtaccaattgccaatattcatgatcgtttgtttaaggtctggtttgcttttggtgtaaaaaatgtggcgcacagttcgactgtaagcaaggcattaaccgaagcaaatagtagcactgattcaagtagtactagtgatgctattactgcagctaatgacgacagtagtaaagatgcaaaaaatgctacaagtagcgctcaaccgcagtcaaagccagttaaaaagcagcaggcttcttcaaactctagcgtaaagccttcggcaaagacaacccccaagaagaaaaagatggcaacgattgcagcggtggaatatccatttttgcctgtgatcgcaggctttttagcatttgatgctgcaattattggtttggccttttacttaagaaataaaattttgaagagaaagaaataatgaaaaatatagctaaaattatctcttttcctttcttgttgctaacttgtttgtttatttttggtgtgactgttagtgcacaaagcgtgagttatcgcacttacaagtatggcacgcatcagacctcgatggctgatggctactatgcgcgtcctgctcaggttgtggtagacgacaatcagtacctggtaacgatgacgattcgcactaagaaagatctaagtccctatccggttcaggtgttaacgattgatggacaagcaccgctaaacgtagtaaaaacgcggcatggcagtgactatgattatcgctatagttttcgcactaataatttaaaacgtgatatttctagtcaaattaaaatagatgtgccacatgtttaccaagcaacacacaatattacttttgcttttaacactacacagttgcctaagttaacaaataaaaaagagcgagcaagtcatgcggaaagtgcgataaaacgcagcgcgccacaggtgaaaaacaagagtgttaagcctaaggagcaattggcacaaaagaagcaagcggcaatagctaacaggcaaatagcgcagaatgcacgcaatcaacgtgctaatcaacaaaggcagcgaaatttttattatgttattttggctggagtgcttagttcgttaattttaattggcgttgctgttttgattgtcgtaaatgccaaggaaagaaaaagtaaatgaaaaaacgtaaaggattaattattggtttaattatatttttagtagcaatcgtcggagtggcaattggtgctaaacgattgattgatcaaaaagttgccaataatgaaaagattgttgccacaagtgcagcgattactgaaatttttgataaattgaacgttaatttagcaggggttccaaagacgcaggctaagttaccagcacgctatcaaaaggtgcccaagattgggagtccaatgaagccaagtgttgaaaagattgcttctttgaatcccactcgtgtctatgcagtctcaactttaaaagatcagtatgatcaatcatttaaagaacaaggcgttaaagttacatatttgaagctggattcagtagctgaccttgaagctacactgagttcattaggcaagcagtattaccggcagagacaggctgattatcagattggcttaatcaaaaaagccgttaaaaaggctaaagcacgtgttcacggtcgtaagcctagagtattgatcttgatgggcttgcctggcgctaattacatgattctaactaatcgatcatatttaggtgatttggtcagaatagctggtggggaaaatatctatcactctgatagtcagatttatttgtcaccaagtaatgactcgctagctactaaaaatccagatgtcattttgcgattagaacatgctttaccaaatgtaactttgccacaatttaagcaagagtttaagaaaaattctgtttggaagacgatgaaagccgtaaagacaggcagagtttatgacctacagcaaccagactttaatgcttcagctaacatgaatgtttctcaagcattgaataaattaagcaactggttgtaccctggaaagtgatcaaaatgaagaaaaaggtaatttggataaacttgattttagcagttttgttaatcagtacgattttctttgcattaactcacggagcaagcaatttttcaatgcaaaagatgactaacagccaattgaatattttgtttaatatccgtgtcccgcggattatttcggcactagtagcaggatctagcctctctgttagtggtgccttttttcaggcaactttgcgcaatccgattgcagaacctggaattatggggatctctagtgcagccagtttatgtcaattgctagcggttattattttgccagaaattttctttggtaaaattattttcgcgattattggcggactgctagcgtttgggcttcttttattattccaaaaaaagatgacgccttatcagttaattatcatcggagtggcattgaatgcagtgttcacggggatgcaggaagttttcactaatagtcaaaatagtggcagcagcctggccacaagtagttggggatcgacgatgtatttattgattattggcgtagtagggctgattttcgcgatttgttttatgaattgggctaattacttgaaggtcaatgatgaagagctgacgtctttaggtgtttctgctaaaaccctgcgtttagtcttgatgctaattgcagtggttttggccgcaacaacaacggcttgcattggtgttttagcttttatcggaattattgtgccacaggttgctcgtttgcttttgggatatgattatcaaaaaatcattccattttcgatttttgctggagcttggtttttattgttcgttgacaccatcggccgggtgattacagcaccgaatgagattgcggctaatattattttggctattgttggtggtccagttatgattttaattttatggaagaggcagaaaaatgcttaaagcgtcgcagattgatttttcatatgggtcaaaacaattatttaatcaattctctctgagcctgcaggagcaccagattacgactttaattggtcctaatggatctggcaagtcaaccttgtttcgcttgcttacacgggcaataaggccgtctgcggggacaattacgctagatgggcaagatatctggcagctagctgcgaaggattttgccaaaaaggtagcaattgtccaccagcagaatcaattgtatgatcagataactgtcaaggaactggttaaaatggggcgtctgccgtatcattccttgatgggggatgaagaaaatggatctgctcgccttcaacagattatgcaggagctagagattgctgatttggcagataagtttatagcgcaattatctggcggtcagcagcagcgtgtgtggcttgctacagcactggcgcaagagccggaatatctttttctagatgaaccaacaacatacttggatttgcattttcagtatcgctttttggatttagtgaaaaaattgaatcgaaagcagaatttgacgatttgcatgattttgcacgatttgaatcaggctttgcaatatagtaatcaggtaattttgctcaaccaaggcaggattcaaaagcagggcaggccagaagaggtaattacggcgcagacgattaggcaaaactttggcatagattgcgagatgatcgaaactgagcagggaaaagtcttgttaatggcaggttctgaggcaaaataaaagaccacgagaaaactcgcggtcttttttgtaataataaattattacttgttaacttcatccttgaagctcttacctggcttgaatgctggaacgtttgatgcagcaatttcaatttccttaccagtttgtgggttacgacccttacgagcagcacggtgacgaagttcgaaggcaccgaagccaactaattgtaccttgttgccttcagcaacattgctcttaacaacgtcgatgtaagcgtccaaaatagtgttaatgtctgtcttagtagcatcagtctttgcagcgatttgatctactaattgtttcttagaaatagtttccatgaaaaatacctcttttaatataaactacgattacttattttaacagtaatccgcgtatttacaaggggaaacagcctctttaaagaatttttttaaaaaggaaagaaattctatgtatttgaagcgaaaaatattgtattcgctatcaaaaatgtagttcatgtaatgattcttttgttttgatttgaaaaattaacttttttcaaaaaatttagacattttttgcgtaataaatgatgggagacaagcctaaattttgaattccaaattttgtacagtgatggaatatataagagaggtgaataatctttaattacacaaaccacatcctcgaaatatgcttaaacaatatcaattaagaacgttgaagaatggattaagaatggcaggtataagactatgagcctactaacttataaaggttaccaaggtacttatcgaagttgaaaatgatactttatttggcgaagtcttaggtctagaaaatacttttatttcttatgaaggaaattctctggcagagttgaagaaagatttcaaagcgggtattgatgattatcttgagaattgtcaattgaatcatgagcaaccagaacaggctaaccaagatgcagctaagttacagttgcaaaaattattattaacatcattagcgtgattggaacaaaataaagctcgaaacttctacaaattgtagtaacttcgagctctgcattaatctgtttttgttcaatacaacgcatgctattacatattggcaaatcgatctagttcatcatgtgttcctaatgcaaccaaaactaggattagttcatgtgtttctttatcaatccggtagtacaatagccaatcgtcattatattgacgattaacgtgcattttgcgattttttcctacagggtgatctttatgtttggctagaaattctttgtcattggttaatattgcttcaacacaatcatcaacataatccattggataatgttttctttcatatctcttgtaagcgcggtagtagcgcttggtaggattaacttgcatgattatttccgcatggcctttttgtattcttcaaaagagctataacttccatgataaatgtgattatcagcttcatagttcgcttcatctagttctgtcatgggtcttagttctaaaggaatgccattacttctaacaatagctttgaaatacattctaattcctgttgatatgtcaaccccatatgaagcaagaatatcttgagcttctttttttaatttatcatcgatttttacactaatttgagccatagtacaacctctattcacaaaacgtattactttatctatatagtactatatactataaatacaaaatatcaatttttagcgtttgcttttaaaagaattttaaaagattataggtagtcttattatgaatactaggggaaaaaactaaaagtgacatttatatctttaatcgtaatacaccagcagaaatttaaacataaacaaagctcgaagcttctacaaattgtagtaacttcgagctttttgtaactattcagaaaagataatttagcggtcttcgtggttagtgaagtaacggtagtccttactcttgtcgaacaatacggcacgagcgttttcaccgttggagattgagaagatagcgtcagggtacttgttcttaacttcatcttctaccaatcctctaagcatttcgttgttagctaaaactgaaccggttaaagcaatcttcattggcttaggatcttcgtaacggtcaagaccgatgatgatgtcacgggctaacagatgagcttgtttcttaataactttgattgcatcatcgctgccttcatcagcaagttgtgcaacgtgaacagccattcctgcaacttctgggttagacatcttgtagaatttagcgttacattcatccatgtgttcaacgccaaataatttagtaaacatttgaatcaaagcgttgtcttcacgcttgtcccagctaagaagagcagattgcattgctgaacgagcaattgcgtaacctgagccttcatcacctaagatgttgccgtagccaccaactgcgattaagtggccgttttgtaaaccgttgtaaactgagccagtaccggcaattactaaggcaccgtcatcaccttcaagaccagcgtaaagtgctaaaagtgaatcagtaatagcacgagtaggtaagttgttaattcttgatgaaatagttgcggcaacttctggagcattaccgacaactgaaagaccggcaataccaacaagaacgcgcatgcagtcaccatcaaccttgtcgatcaattcgttgatagtgtcagagatattcttaattccgccttcgtagtcagcgttaatttggcctgggccgccttctgcacgaccgatttccttgccagtttcgtcatatgcgattgcagttgagtgggtaccacctgcatcaacaccaatttggtatttaagagccatgttgtaaatcttctttctatattaatttatccgaatgataacgtatacattgtattatatttttatacagtaggtctagtaaaagttttgctgttagcgctaacagtggcttttttcttgcaaattaataaaattgttaaactaattaagctaaccaacatccccagtagaagaacccatggtacataaattaatgtaatttgatgttttcctggattcaacttgaagtttaaaaaagcattcatgaacaaggttttattcttgttaattattttgccattatctaaaactaaccagttaatgttattaggaatagttgacgccaatgtcatcatcttcttcgttgtgaaatgattagatttgatgatcaaagcaggtgtttgtttaaagtttggttgtttttgcttaaaacgatgtataatctgctcgagcttttgtgtgtttaagcgccagaagtgaatgccactaaggtctagtttatctttttttagttcaaaagtaacttgcaaccgttgaccacgctggtggctacctagattaatgagacgggcattttgatcacgtactgccagattaatattagcaccattaactgtcattgaaatggcattatcatcgatctcaccgggcatttcaatgtagtaagaatcatcagtctgtggtttgaaattgaaaatgatgcgtgcgatttgcttattgtttttacgattatattgtagttgatcgtttttcatactagttacattaattaattttgctttaggccaattgatctgcttaaacagctgcacttttgcccctgtaactgcttgaaagaatttggtttgattactagtaatatctagagagttaaaattgattttttgcgttttttgtgatgttaaaaagagtaggggcaaagcggcattatttttcactagatatagttgggaaaagcgtttttgcaaatgataatcgctggcatcaacgcggtggttggaattgtcatacttcatttgcttaccagacttgatcgttgtgatttcatcattaggcaaaagataatatttgattccaagtaaatcatctgtcaaagtagttccgccaaaattagtgtaggaattactattgtttagaaatccaagattgttgatcaggttgagtactttttgatcagaaatcgaattaaaattacttaaaccgtaataaccagcgctaaaaggatcatcatcagaacgatagaaagtcttttcagttcggtaaaatccagaatcatgttgatttgcgtattgtactgcttggctgacattagtggtaaagttctgataatcgctatttttttgataagctaaattgcctagagatagtactaggttgacgattaactcaagctcgataactaaataaaaaaatggcgcggcaaaactgtgttgatgataaataaagccaataaacaagattccgagggctagaaaagctcccgtggcaatctgcgcatcttcagttagaaagtcaaaatgtgaggcattaaatactatataaacaattaaacctaaagaaaatagagtcagaagtccggtctgccaataagctatacgttctttttgttctaatgcaataacgcctagatttagcgcaaaaaagatcaacacaaagctgaaacgaccaggataccagacagggaattggcctaaatgccagagtaaaaccagtggtgtccaaaaaagagaagcaattaagaaaatgagtaaaattccgtttgctaatttacgctgccagttaatctttttgcttaaaaaatataaaattgtcagcaacaagaaaggcattgtcagataaatgttgggcatcccttcctgcatttcatgaaagttataggccccttcggctaacttagtcagctgttcaactggagaaaactgccagcccaaattccatgaggcagtagaactagccttgccttgcaacatttcaatcagaacggggaagagcataaaggcatctaaaaatgaaccagcgatactttttcttaaataaatccagttaaggcgtaggcgctcctgcttattgatgaagaaaattttgcttaacagataaagcaaaccaaaggctaatgccataaatccggtataaaaattagtgaaccaaagcaaaaaggtaattaaaattaacttattttttcgttgggccagcaagcggtcgatggcattaatcaataaaggaagcaaaatcacagaatcaagccacatcagattatagtgattgccaataacgtagcctgaaagggcataagccgaactagccgctaaagcgtaaaagtgattagtgattttttgcttccaatagtagtaggaagatagtcccgccgctccaatttttaatgcgataataattaaaattgcttgtggcaaaaaatgttgcggaaataaaaataagagtagattgaaaggactgcagagataataggcatcagttgctagcattgaaccgcctaaaccattagaaaaggaatagattaagcgcaagggatgggagaacaaatttcgcctgaagaaggcaagaaaatcaacatattgttgacctaagtcgacagtgagcactccatttttgctgtagaaaaagtaactcaagaaaatcaaagccggtagcaaaaaactaagccagaaaaaaatatttttacgattaattgcaatgtgtcgtgagttaagaaatttaagcatcattaaaaattatataagctcccttatgaattgtagaattgatgtttactttttgttaaaatacatctagttttaataaaggtgatttacgtgaattattttagaaaaaatagtgggactggctcaaacaagcattcctcaactccaattagaatgcgaatcattctaggggtaattttagtcctctttgccatgttaattgggcaattggcttatttgcaactagtttatggttcacgtttcaaggcagaagtgcaaaaaactgattcaactgttgtttcgcatcaagtgccacgtggtgtcatgtatgacgctaagggacgcgttttagtaggtaataaagcaaccaatgctattacttatactaagagtgcctcgactacaacagcagatatttacaagatatctaatgccttgagtaattatatcaagattagcgatgaaaagccgacaaagcaaatggcagcagattattatttagctaatgaagataataatactaagatatctaatgctttgccgaagtcagccaagattgatgctgatggcaataagaagacttcagctgaaatctatcaagcggaattggcttatgttgaaaaaatgaatcctcaactaaccactcggcaaaaaacagcggctttaatctttaataagatttcaggggcttatactttatccacgatttatatcaagaataaaggcttaaccgatcgtgaaattgcccaagtaggtgagcacttatcagagcttcctggtgtgggtatcggaactgactggcaaagatcttatccaaatggttcatctattcaaagtatcattggttcggtttcaactgaaaaatctggtttaccaagtgatagcttgcagtactacttaagaaatggttactcacgtaacgaccgggtaggtacttcctatcttgaaaaagaatatgagccacttttgaagggaactaagtcgactaaccaggttattactaaatcgaatggtaatatccagcagactaagactgtttataatggtcaagccggtgccagcttaatgttaacgattgacgctaagtatcaaaagcaagtacaggctactttgaaacgggtttacagtacagctgttggtaacggtgcagcaagatactctaatggtgcctatgccgtggcgatgaatcctcagactggtgctttgctagctgtagccgggattaatcgaaacacgaacactggtaaaacgactgataatgctttaggtgtaattaaccaatcctttgttatgggatcagttgttaagggggctactgttggtggtggattaattaataaggttattactcccgaaaacaatactttgcctgatacggcaatttatttgccaggttcaccagttaaaaagtcagtttatccagttggtactttcagttcattggatgctgaaacagcgttggaagtctccagtaatatttacatgatgtacttagcaatgaaatgggttaaggctagttatgtaccgaagagctacattcatatgccaaacgatgcctttgacattttacggcgtaattttgctatgtttggcttaggtcaaaagacaggcgttgacctacctggtgaagtgtcaggaattgaaggtaagtcatttaatgacaagggtaatattctttccggttctgtacttgacctagcttatggtaactatgatgcttatacaccaattcaactagcccaatatgtgtcaactattgctaatggtggtaagagattgcaaccttatattgtgcaatcagttggtaaaactagcaaaaatggcaagaagatttacattagctacaataagaagccaaatgtccaacaagtaattccttggacgcttgcggaacttaatgtggttcaaacagggttctatcgtgttgttcacggtacaaatggttggggaactgctcacccattgaaaaatgttaagccatcaatttttggtaagactggtactgcacaaactttctactatgatgctgaacaccctaatagaaagcacaatatcgaattgattaatgcaacctttattggctatgccccatcgaaaaatccaaaattagcagtggcggttgttttcccaggattagaccctgatggtgaaggaacatacacattgcaagttgccaaagcaatggtacaagattatttcaaacttcattcaacaaaataaagaataatactggtcaaacagcttgaaaaatgctattctagtacagtcagaataaaagtgtaggtggtgaaaaaaatggcagataacatcattttagaatgcaccgaatgtggcgatagaagttacttatctaagaagaacaagcgtaagcatccggaacgtttatccttaaagaagtattgcccagttgaaagacgcgcaacacttcaccgtgaaactaagtaataaaccaagatagcaggttacgtgcctgctattttttgttttttggacaaaaagatggaaaaatcagaattaagaaaagaacaaatcagtaaattaaaagaatttgccaatactaaagaaaaaagagcagaagatgcgattttattagagaaattaatgtctacagatctaattagaagaagtcagacgattggggtaactgcttctttaccactagaagtagatacttctgaattaattgctcgtttgtgggataaaggaaaagaagtttatctggcaaaggcacgaggcgatcaaaatcatactttagactttttacgctatacgtatatgagcaaattggtaaaatctaaattcggtgtggaagaagtcgccgatgaagatgcgaaaatcaataatgatttggatttagtcattgtgccaggtttagcctttgccttagattcgcatgttcgacttggctttggtggaggttattatgatcgctttttggctaagcatgatcctaaaactgttgctttagccaatagcaagatgacgttcgatactagcatttggcctatcgaaaaaaccgatattccggttcaaacaattgttactcctgataaaatttattaaaatagtcacaatgacgaagataagggggattaaatgaatactcaacgaaaaattaacctctcacaatcatttgtgactttaggaattttagtagttttattaataatctttttagttgaagtgtttttaggtggctcagagaataccaatgtcttgatgaaaatgggagccatgaataattttgccgtggtggctggacaccaatggtggcgcctatttacggcccagtttttgcatattggcatcatgcatttggtttctaatgccattattatttactacatggggcagtatatggagccattaatgggacatgtgcgctttttagtaacttatcttttagctggggtcggcggcaatctaatgagcttggctttcagtgctgatcgcggcttaagtgctggtgcctcaacagccttatttggtttgtttggagccatgactgccattggcttgcgcaatttgcataatccaatgattgcttttttaggtcgacaagcctttgtcttagcattgattaacttagcgcttgatatttttgtgcctggaattgatatctggggtcatattggtggcttaattgccggcttcttattagcgattatcttgggcgatcgtgtaatgaagacctacaatcctaagtggcgcgtattggctgctgcagtgttagtcgtatatgttgtttggacggttagaacaggaatgataattaatttctaatgaaaactctctacgatgtacaacaattattagaaaaatacggaattttggttcatgttggcaaaagaatttgggatattgaattaatggctttagagctcgacaatatcaatcgtgccggtctgattgaccaacatgattatttgattgccaagatgattttgagtcgagaacatcgaattgaagtcaaaaatgaacaaaaaaaggcgcttaaagatccgaaaaatgatagccagtaaattagtttagcggtatcataatagatgtaagtttttatgaaagggcagatttagtttatgtcgagttttttaattgtcttagatttagttttattagtcattattttagtcatggttggtatctgggcttggaataaaattcaagctaaatcaattggtggcgaattgactaatgaagaatttaaagaaggcatgcgtaaggcacaaattattgatctgcgtgaaaaagaaccgtttaaacgcaagcatattgatggcgctcgcaacttgccatataccatgcttaagtatcaatatactgagcttagaagcgacttgccagtttatctttactcagattcaaagaccattactttgagagctgcccgttttttaaagaaaaagggttttgtttctatccattggcttaaagatggctttgaagcttgggatggtcgaactaagaagtcaaaatattaaatgaaaagaagacgcatttggagggggtaactctaatgcgctctttttttgtatcaaaattaagaaaggtgatggggatgaaaaaggtactagcgattgtaggaccaacagctattggtaagacagacttggcgattgatttagctaaaaggttgaacggcgagattatttctggcgattccatgcaggtttaccaagaagtggcagtgggaactgcaaaggcaactgcagaagaacaagcgcaagtgaaacactacttagttgatacgcaatccgtttttgacgagtattcagttaaagattttgtggatcaagcaacaaaagcgattgaagagattagccaaaaaggtaagttaccaattattgcaggcgggacaggtttttatgttaatgctttattgaataagatgcagctaggcgagaaaactccagaagagcgtagcgtttcgcaaaagtgggaaaactacctcaaggaaaaaggcgcagaaaaattgtggcaggtcttgaatgagcaagatcctaaggcggcagaaaaaataccagtagccaatagtcgcagaactatgcgagcattgactgtgattgagcgtacaggcaaaaagttttcagagcaacaaaagcagatcgagccccgttatgattacttgattattggcttgaattctgaccgtcaagagatatatcgcaggattaatttgcgtgttgataagatgatggagcaagggatgctcgatgaagcaaaatttatttatcaaaatcgagcacgagagtatcaggtcttgcaagcaattgcgtataaggaatttttcccttattttgaagggcaagagacgctagagcatcgcattgaagatttaaagacagcttcgcgccgctatgctaaacgtcaattgacttattttagaaataaattaccagtagtttggtttgatccgttagatgatccgggttgcgaacaaaagatattgaagaaagtcaaggaatggaaaaatgaataatttgccagaaaaattacaaaaaattgttaaagaagttgatcaacagatcgcacctaaactggttgagattgaagatcaaattgtctataatacggctaaagttttggcggcttaccaagctaatgatgtcgctgaagccgatttaaatggggctaatggctatggcgacgatgatatgggaagagataagctagataagatctatgctcaagtttttcaaactgaagatgcggtagttcggcctcaatttgtttcaggtactcacaccttgtttgtagctctagcaggtaacttgaaatacggcgatacgctaacttatttaactggacagccttacgatactttgcaaaaagtgattggcttgactgatgataagcgtggtactttagtcgagcgcggcgtgcatttttcatatgtgccgttaaccgatgatgggttagttgattatgacgaggctgaaaaggttcttaaacgtgatcagcctaagatcgttgccattcaacgttcacgtggctactccaccagaaagacctttacagttgatcagattaaggacatgattgcctttgttaaacgggtcagccctaagagtattgtctttattgacaattgttatggcgaattttcggaaaaacatgagccaactgagtatggtgctgacttaatggcaggatcgctgattaagaatgctggtggtggtctagctaagaccggtggttatattgttggtaaaaaggacctggttgaaaatgcaaaacttgcattgactgctccaggctgcaccgatgagggcgccactattggcaatttgcatgacttttatgaaggctttttcttggctcctaatgttaccggtatggctgaaaaggggatgatttttgcggctgctttgtttgccaaaatgggcttgaatgttaccccagcttgggatgagaagcgaagcgatattattgagacaattatttttggtgatcctgataagatggttaaatttgtgcaagaagtacagaaaaactcaccgattgattcctttgtaacgcctgaagctgtgcatatggagggctatgaagataagattattatggctgctggtaatttcgtttccggttcaactattgaattttcagcggatggtccaattagaccaccttatgcggtttatatgcagggcggcttgacttatgcgcatgacaaagtagctattattaacgcggttcgtgatacattttttaacaaaaaataaaatttaaaaataatcactagaccaatttgacttttttaaattggtctgctattgtattaaacagttctaggagataagaataaatcataggaccataccaatttaatattttttgtttttataggtgaattaactatgagtaaacaatatactgcagaagaaattaagcaagaagttgaagacaaggacgttagatttttacgcttggccttcactgatattaacggtactgaaaaggccgttgaagtacctaagagtcaattagataaagttttgactaatgacattcgctttgatggttcttcaattgatggctttgttcgtcttgaagaaagtgacatggttttatatccagacttctcaacttggacagtattgccatggggtgacgaacacggtggtaagattggtcgcttgatttgttcagttcacaccactgatggcaagccatttgctggtgatccaagaaataacttgaagcgtgttcttggtgaaatgaatgaagctggattcgacacttttgatattggttttgaaatggaattccatcttttcaagttagacgaagatggcaattggactactgaagttccagatcatgcttcatactttgacatgacttcagacgatgaaggtgcaagatgccgtcgtgaaatcgttgaaactcttgagggcatgggctttgaagttgaagcagctcaccacgaagtaggtgatggtcaacaagaaatcgactttagattcgatgatgctttgactactgctgacagatgccaaacctttaagatggtaacgcgtgcaattgctagaaagcacggtttgtttgcaagctttatggctaagcctgttcaaggtcaagctggtaacgggatgcacaacaacatgtcattatttaagaatggcaagaacgtcttttatgacaaggatggcgaattccacctttcaaatactgctctttacttcttgaatggtattttggaacatgctcgtgccattactgcaattggtaacccaaccgttaactcatacaagcgtttaattccaggttttgaagctcctgtttacattgcttgggctgctaagaaccgttcaccacttgtacgtattccaagtgctggtgaaatcaatactcgtttggaaatgcgttcagctgatccgactgctaacccatacttgttacttgctgcatgtttaactgctggtttgaatggtattaaagaacaaaagatgccaatgaagccagttgaagaaaacatctttgaaatgactgaagaagaaagagcagaacatggtattaagccattaccaactactcttcacaacgcaattaaggccttcaagaaagatgatttaattaagagctcattaggtgatcacttaatgcacagcttcattgaatcaaaggaattagaatggtctaagtactcacaatcagtttcagattgggaacgtcaacgttacatgaactggtaaaaataaataagtaattggaaaatctcgtggtgattgaggccacgagatttttttgtaaagtatagatttttcaaaagcatatctaatcgtaattagtctaattacgattagataagtgaacttatggataagtttttaaatctagtaggataaacttttaccaaaaatcaaaaaatattctcttcaaagaagagcaaactgctatataattgtaataatgactggactggtatccctaattagtttagggatacttttgtgttaatgagaatgtattggagtcgatggaatgagaaataagacattagtagcattttgtttgatagctgcaatgatcaatttaactgcttgccaatcgcaaaagcagactaataatcgccaaactattgaaaaatctggtgtgactcagaaacagactcccaaaagattaattgttaagagtatgtcagatactgaaaaatctagtgcaatctcaatttatggatcgatgaaatatggggatgcatggaagactgcatatagtgatgccaagaaaaatcatttgagcattagtgtaaaaaatcgaactggttttaattggataaaaaaaggtagaggttacatttatgaagtaactggcaatggtcaagaaaataatgctttttatacaatgaaaagtgaaaccgtatatttttataatcagaagaaaaatttaggtgtagcaagtttatctgaaatagcttcatatttaagtgaacataatcaagtaaaatctgtagaaaaattagcaactaagactactttggctgctgaagttacatctgacaaatatggggttaagggtgacgatggcctagcattagttccaacgagactttggggtacttggtacaactataaaggaaagaagttagtaattactgatcatactgttaatggtgaagaaattcatcatatttctaattctggtgtagcagcagaatccttagatcaaacgaaaaagtgggctagagctcggatcgaaaatattaatggattaaattgctatcatgttcaaacattgaatgctcaagattttggcttactttattctgtccaaaaagataatggcaatacggcagtagtaacttatagcgttgatacaggtcattatacggctacttattggaagagcaccaagatagccaaggaacaccgaaatgcagaatttaagactttaaattaatatttgtaaagaagtattaaaataattgcaatgaacaagaagtataatttttgtaaaataatcatgtaagaagttggcggatcgtattttttataatactattaagcaaagagatagaattattgaaagaaaaggggattccttttgaaaagtaaattaactgttttggttgcaatttcagctgctttaactttagcaggatgtagccaaagtacacaaggtaatagtaattcacaatcacagtcagaaaaatcaagtcaagtttctaagagtaactcagaaaaaactggcacctcagaatcaagtaacagtcaaaactcagcaaaattatctgctgagaatatggactataagacgcaggctagtgcaatctctgtctatgctgcacaaaagtatggcgacacttgggaaattgcagttaatgctgccaaaaatggtaatttaggtgttgcgttcagaaccaaagccgcaacaggtattacttctgatgactcaggatatgtttatgaggtctccggtaccggtaaaagcagtaatgctcgttacatgctaaacggagatggagcacaaaagaaaattactatttttgttaagcaaagaaaccttggtactgtaactttacaagatgtagttgattacattaataaaaataatgatgttgatctagttcaaagcttggctaaaaatgccaaactaaatgttaaacttgaaggcgataatgacaatgcagctggtgctaaggaatctgctagtgccgtaattccatcaagcttgcaaggtacttggtacactgcagatactggcaatggcaatatcgatactttgactgtaactgctaataagatcaatgatgaagctggttttagcatggatgtaaaggctaaaaattcaggttcatcaactagttcaggctatatgaaacaagctactattaatggaattaatttctatagttttactaatatgggtcaagaaccaggtcaaggcagtacatatttggcaccgcatactgaaaatggtcaaagtgtaattgtttcagctaactctaagggaacaactaatgctgtctactggaagagcgaagccttggctaagcaaaactccaacaagcaatttagcgatctacagtattaaaagtgaataaaatatagaattaggcgatatctttgtgatatcgccttttttgttgtgaaaataaatttctaaaattatggcacttcctttcaaaacatatgtttgatataattgtaaaagtgtttgggcagactaatgaactgactattgagtaataaggaaaggaattatatggattttttagctcaaaagaaggaataccgttttaaaaatattgaaaatcaagtgtgtcgtgttcatactcatttggctattaacaacaataatttgaaagtttggagagaaaatgatgataagaaaagtagaaaggctactaagttaataatggattcactacaagatgacaataaatacatgtttcctgatttagtaatagttagttcaaaatatttgaaggtagtagctgcttacgatcgcgaaaaagatgttatttatgttaataaaggtatctatactcatcaaattgttaaatcgcatttaaagtcaagttatttcgttgctaaagatatgagaggaattttgtggcatgaatatggatataaattacattgggatgcagttaaaagcttttataaagtacataaaagtaagtataatgatatatattaaagaagcaaagatgttttttgattctaaacttgagcattatataaggctacagtatcctggttatcttaggaaagtaatcagttcgtatgcagaagatagttactttaaagaacataaaataaatgaggtagtagctgagttttctgtgataggaaatacgtgtgataaagaattgaatacaattattagggggatgctagaaaatgcaagtgctaaatgatttgaaaatgccgaataaagaaacactatattttaatgatcatattgtcccttggatagaaaaagaagagtgggctaataatgagcatacagaagtcgctttaacttttaagaaaaacaccccagtagatattattaataaatttttgatttgtcgatctgaattagcctattaactatactgcagattataaaattgtataggaagaccacatgttgtatccatatgcagaatttcctggggaattgtcaattacatattctcaaataatggtagacgataatgtaaagggtggtaaaaagcttttggtccactttgaacaaccgacagattatggatttaaagaagccagatatgagttgcctgattataaagaaatttacaactacgactttacaccttctgaaactagaaataatctagatattcttaagagaaacgaaagtctaatttggaagtgtgccgaagaggagaaaacaagtacctaattattttcggcttaaaaattttactatgactacaattgattttcatgactaataagaagaactcactataagtgggttcttttttaataattacaccactataatatcttaagtaaagctaaaaatgattcagttagaaaagagtaaatatgaaagtcttaaaaaaagtgggattagcgttgttgtcagtgatactggcatgtgtaattatcttctgtggctattatatatatttgtctctacattattatcgaattcctgataatcaaagattgaaaattaataacaatcagtctcagttattaaaagcgggggcgtagctataagacaacgacttataatgttggctttggtgcttataatcatgatttcgacttctttatggattcaggtcagttgaaggatggcaagaaaccgcaggggcatcgagggacagcaatatctaaacaagcagttcttgattccactaatggtgtcattcaaacaatgaaaaagcagaaccctgactgcatgtttttccaggaaattgatactgattcaactcgtagctttcacgttaatcaggtgaaaaaggttgaagatgattttccaaaaatggattcaacttttgctagtaatttccactctgcttttttagcggttccattgaacaatcctcatggcactgtacgttcagggttgttgagtatgagcaaatataagatggatagtgccataagaagaaaatatcctgtttctagtgggcctattgaaaaatttgtcgatttagatcgttgctttgtagttatgcgctttccagtaactaatggaaaagatttggtaatgattaactcacatatgtctgcttatgataagggcggtaaaatgcgtaaggcacagatgaaactgatttcttctgtgatggaaaaagaatatcgacgaggtaactatgtcattgtcggcggcgactttaatcatgcgttagggaaagacatgatgactcattttgagcaccaagaagaaattcctagttgggtatccgttcttgatcaaaaaatgctgcctaaagatttcactatgattaaggcgcaaaatcgcgaaaatgttgcgactgttcgtgctacagacatgaaatatgatcctaaagttaattatatgaccatttgtgatggctttattgtgtcgaaaaacgtgcaagcaaaggcgtataacattaatactcattttgagtatgcagaccataatccggttaggttggagtttgaacttaagtagatttggacaaaatgaaaaacactggatcatgaaactgtagatttatgatttagtatttacgaaattaacttatgaggtaaaatctaatgaaaaaagaattatcatataaaggttattatggttcagtggagtattcattagaagatgatactctctacggtaaagttattgacatcaacggtcttttatcatatgaaggccaatatggggtgaaataagatgagtaagattcaagagttcatcaagaaagatattgagagacatccagaattaaaaaaagaatatgaacaggtagaccttgatttagatgcttcagtattagttaaagatatgcgcgaaggttgggaaatgagtcaataagactaactgaagaatagttagtaaaataatgaaaagcattaaaattatatttgacttttaaaatgatttagactattatcttaatcaacataattattaattatttagcgatgataaggaaagtaaattggcggtccttctacagagagttatcacttggtgaaagataatgatcgacctacttttgaaaatggcctttgagcttgaagctatgaagtttttagtagcttctgggtccgcccgttatagcggtaacgtatcgccagacggccgtacgcaattcaaggtggttttccataaagataggtggtaccgcgttactgaacgccctattagatcaagttgatctagtaaggcgtttttctttttaccgtttttagcaaaggagatttttatgagaataaataaaaaagttgtttcattcggattaatagctttaactacggcaaccttagctgcttgtggtaagcaatcagatagtaataccgtttcaaaaaagcaggttttaaattggtcagagatcacacagctttctacgcaggatccttctttggcaactgatactaccagttttcaagctcttcttaataccggggacggactataccgccttgataaaaacaataaaccgcaattatctctagctactaaggctaaaacttctaatggcgggaagacttatgatttttatcttagaaaaaccgcaaaatggtctaacggcgatccattaactgctaaggattttgtatattcttataagcgtactgttaatccagtaactaagtctcagatggcattctatctttaccagatcaaaaatgcgcaagcaattagtaagggccaaaagtctccggataccttgggtgtttctgctccttctaaatatcatttgagaattcaattaactagaccactgccttacttcaagattttattgtcgtggccattatttttcccgcaaaatcaaaaagtggtgcaaaaatatggcaagttatacggcacgcaagctaaatacacagtttcttcaggcccattcacgcttactagatggaatggtaacaacaagacttggactttaattaagaataagaattactgggatgctaaaaatgttaaattaaataaagttaatgaacaggttagcgaatcaactacgactagctataatctttttgaagcaggtaaggcagatgagactggacttactggtgagcaagttgccgcaaataagaataaagcaggctaccatgcacgtttgtcttcagcgattaaaagattggaacttaacgaaaataaggttccagcattcaagaatcttaaggtacgtcaggcattttctttagcaattaatcgcaaacaattagcaaataatgtcttaaaagacggttcaatcccagctaaaggcttcgttccatcaggtatgggcaataatcctaagacaggaacaccatttgaagatgatgcttacgttaagagtgcagtatcgtataatcttgctaaggctaagcaattacttcgcgaagggtataaagaatctaagactaactcaattaaaattaccttgttagtttctgatgacgatacttcaaagcaaacagctgaatttcttcaaagtaagctagatcaacttccaggtgttcaaatttctgttcaaacaattccatatactcaattgatttcacgtcaaacagctggtaattaccaagctacaattaaaaactggcaggctgtctttggcgacccaatcaacttcttggacgttttccaaaaaggatcaagttatttgaacaatggttggaataacaatcaatttaacaagctgttgaatgaatcagaaaacgtatatggcaatcaaccagtaaaacgctgggcaagattagtagaagccgagaaggtattgatgaaagaccaaggaactattccattagttcaagttgctaagccacaattattaaagactaccgtaaagggcgtttcctttaaccctacaggcgttccatacgattttaagaacgttagaattggatagaaaaatagccgttgattacttgtataaaaaacaagttttcaatggctttttttctgttttgtgctaatacctaaaaatatccagttagatttcaggtaaaacacttgaacaaaacaaaaacgccttcaataacagaagacgttttctagagtgcgaagtattatgaattatccaattaatctcttcaccataattattatatcaggtatataaggttaattggttaatactatctatgaaatatagttaaatcagatataacaaacgataatcatatcaggctatttgttgtatgcatcgtatttttcatttaagacagaagtaatagttcgagtcattctatcgtgatatttattattctttaaaagtagcgtagtaattacgtctattacatacattattgaaaactgtgagttaataaaccgagcgtcgttaatataatttgtatcttgaacaccaactacaatatcagcaagctgagctaatgggctattgtcatagctagttaatgctacaactgtagctttattcttttttgctagttcaatggctcttaccaaggaatctgtgctacctgttgaagaaatagctataatcaggtcatcttttgaaatgatactgctagtcataaacatattattactttctgtttccgcaaacgcagatatacccattcttagtaatctttgagtagcttctaagctggtatatccagaagaaccgataccataaaaataaactctctttgcagatttgatgagttggattatcttttttaattgttttatatcaagtttattttgtgtttcagatagaactcgattgtaaaaatcatatacttggtgagcggtcgttttagagttatcttgattagtaatagtatttacttgtgaagaagctgcagcagcagccaatttgacttttaaatctgtaaaactagagcagttaactctacgtgcaaatctagtaatagtagcattactaacttttattgttgacgctaattgatttatatttgctgattgaataaactgtgggtcctgtaatataaataaagcaatttttctttcttgctgaggtaaatcgggtagcctattttgtaaatcagttaaaaacgtcatattgaaaaccttcttaatgtgttaaatcaaaaaaacagagaaagattttgtaatctttctccgcttaattatgctaaatttgtagttttttggcaaataagcaattacttattaaaatatttagcgtagatttcgtcagcgccttcaataactttatcagtgtatttagccattggttcacggttgtagccagcatgtacgcccatcttttgcaatactaacttaattgatgggtaaataccgttattaagaagggcagtgataatgtcgttcttcttgtgttctaattcttgtgccttagcaatgtctccgttgttgtaagcagcaatttcttctttaaccattcttgcattaacgttgtaggttgatccgatacagccatcgacaccttcaattaaagcaggtaacaacatttcatcgaatcctgaaagaataagcttatcagggaagcgctcacgaagtctttcaagtaagtagaagtctgcattagtgtacttaacaccgataatctttggatttgagaataatttagcaaagttatccaatgaaagtgaaacacctgttaatgcagaaattgagtaaatcaataactttgcatctacatccttaacgatttcatcgtagtaatgcttaatttcgtcgaaggtaaagttatagtagaaaggagtaactgcagaaattgtcttgtaacccaattcagtaacgaacttagctaattctttagcttcttttaagtttgggccacccacttgagcgatcaagtcaacttgttggtcaacttcgtcccaagcaatttcgaagatcttcttcttttcttctaagccaagcataaagttttcaccagttgaaccgccaacgtataacccgtcaacaccttcaacatcgatatcgtgacgaatgatttcacgagtacctttttcatcaatattaccatcttcatcaaatgaaaccattaaggctgcataaactttttgcatttgtttgacctccgtttagtcaaaataaaataatatttttttaattactgtataactaatggcaaattcaaccaacacctgcagtatagaacatgaaaacgctttacacaactctaaattgcgaaaataattttcagaaattgaacaaagcgtaggtgtatcaagagatacagagcacgaaaattattttctaaatttttatttgagaaaattgtttttaaatgatactatgaaagcgcttaatataagaacttgattatacaggaaggcgtgaaccaaatgagtaagaaatatttagcttttgatgttggcggaaccacgattaaatacggtattgtagatgagaatcttcagatttcagatagaggcaaagttgatacattacataataaggacggacatattttgaagtcacttattaaagttaccaaagagatgatacagaagtatcaattagatgggattggtgtgagtaccgccggtattgttggagacgatggaagcataatgtatgctggaccaactatttctgactatcaaggtactcccattaagaaagagctagagcggacatttaaaattcctgtcagtgtcgttaatgatgttagtgcggctttattaggggaaaaattagctggaagtgttaaaaatgctagtactatctattgtgttgcattaggaacaggaattggtggtgcattttgggcagatggacatttatttaatggatatcatcaaacgggtaattcaataggatatacattatttgatccaataacatcaactaactatgaacagcggtcatcaaccattgcattacaaaaagaattagaacccttaggtattgatcctattgaagcctttgcacgtgccaaaaaaggaagccttagagaaaagaaaattattgatgcttgggccttgcaagttgcagagggcttaagcagtgtattattacttcttgatccagaagtattagttattggtggtgctgtttccaagcagggagattatttaaaagatttgttggacgaaaaattgaatcagattttaccgccaaatctatgtaaaaccgtattaaagatggcttctttaggtaatgatgcacaactttatggaggtatttctagcatttttgaaaattaatttctagaaagcgcttgcaataaaattgttttcgtgtatgctagaggtgtattaactaatagcaaaattcaaccgtacttatgtgaggcaaatgctgagcataattgtacggtttttttaatcccgtttattgaagaaaagaggcaagtcatgaaagtttcagtgaatgcggcaatctttgttgatcgtttgaatagcggagagagtcaaattgattgcttagaggatgtttcaaatttgaaagataaaattgacaatatccaagttcgtggagaattctttaaagaaaacaccaaagacgacgaactcgaagcaatcaaagcattgtgtaaaaagaacagttggggattgtattattcagttcctgaacaatttttcattgatggacatgtcaataacagtttgaaagacaatgttgaaatggcaaaaaagcatcaattgaagcatttgaagtatttcgtaggtgacgttaaagatgttgaccaaaaggaaattgaggatgctgcgaagcttcttgaagatgctaacgttgatttgacattggaaaatctttctaatgaaacaggctatttaagtactgttcttaaaggtcttgaagcagtaaatcaatatcctaatattggcttcacttatgatgcaggtaattggtactgggttggtgaaaagcctgaagttgcctttaaagaattaaaagataaggttactaactatcatctaaaggatattaagaataaaaaaactgtgatgttaggtgaaggaactacagattgggaaccaatgattttaggacttgatcctcaaattccaatcttcctagaatatggcattgatgataacaagattgaacaagaacttgacaaggtcaatgctgttatagacatgcggtaggtgactttgatgacgtaccttgtacaactatttttgattctgctattaactaaaattgcggcacacttttcagttaaggcaaaaatgccaagtgtaattggagaattattagtcgggattttagttggaccagctattttaaattggattcagcccaccacattcattaattatttttctcaactaggtgtaatcgttttgatgttcattgctggcctagaaggagatttgaaattattaattaaatattgggctccagctttaactgtagctactttaggagtaatttttccaactggtacagcatatcttctgtgccatacggcttttggattttcagtaaaagcatctatatttatgggcttagttttaagcgcaacatctgtaagtattacggttcaagttctaaaagaaatgaatcgtttaaatactcgtgaaggtgcaattatctgtggtgctgctgttgctgatgatattatctgtgtcattttattaggaatttgctccagtatctacggtggtggtcaccatacatcaatcattaaaatgatcattccgatggtattattctttatcattgttttgcttattggtaagtatgttgtgccaaaattcttagatatttttagtgatcttaatgcttctgaaagtgatacagctggtgcgatgattctttgttttggtgcagctgccttagcagttgcaatgggaatgagcgatgttttaggcgcatattttgctggtttagcaatttcagaaactaattatgcagacagattatcaacaaaaattgagccaattggttatgcagttttcattcctgtgttctttgtaagtattggcttacagattagttttaatggcatgggtaaggacttattgtttattgccttactaataattatagccatcttgggtaaacaaattggttgtggtatcggagcaaagatgttccatcttaattggacagaagcaaatattgttggtgcaggtatggtttcaagaggagagatggcactagttgttgctaatgtagctcttcaatcacaattaatagatcaaaatcactatactgcaatgattgttgtcacagtaatcacaacattgattgcgcctattatattgaaacttttcataatgcgaacacaaagaaaagaagtaaaaatgaattaaataaaaggggagaaaaattatgtcgaaaacaggattcggtatgtggaacaggatcgtcttaatcgcatatttgctagcgatgttaggcgttggtgcttactttactaaacgggcaagtaaaagtacagattctttcttcaaagctgaaggtaaggtgcctgcttgggctgcaggatttagtatttgggctactactttaagtgcgatcacgttcatgtcaacaccagaacaagcttttttaactgactggggttattcgattgggacgttaacaatttatttaattattcctatattaattaaatggtatgtacctttcttcagaaaattacaggttactactgcttatgaatatctggaaaagcgttttggaccagtgatgcggtcactcggaagtttgctatttatgctttatcacattggtagagtagccattgttatttacttaccaattttggctattacttccgtttcaaatattaatccaatattgattgctgttttagttggtgcaatgtgtattatttatgcattcctcggcggtattgaaggtgttatttggacagatgttattcaaggtttccttctccttggtggtgctttattaatttgtattttagcagtcgtatatactggtggacctgggaagatcgcacaagttgctgtagataattctaaattcttatctgctaaagattggaatcctaacaatttagctatgttcattccagtaatctttgctggtcaattcttcaatagtatgtatcaatataccgctagtcaagatgttgttcagcgttatcagactactccaagtattaaagcaactgccaagtcactttggacaaacggttggttagcaattgtaactatttttgtattctttggtatgggtactttcttgtattgttattaccacacgatgggaagtttaccaaaaggttttaacactagtgctattgttccatactttgtaattaccaagattccagcaggtttagccggtttaattattgcaggtatcttcgctgctgctcagtcaactattgcttcaagtttgaatgctatttcttcatgtttcgtaactgacttcaagcaaagatattttgataagaaatggaagatgaatgatgttacactagctcgtatcattattgtcatcgccggtgtatttagtttaggaattgctatttacttgttgatgggtaatgcatctcaaacttggaatatcttcctttcaattactggtttgtttggtgttccagttgctggtatttttgctgctggtatctttactaagtcagccaaccgtgttagtgctgtctggggcgtattaattagtgctgctcttacttattggtgtcaagtaatgggtgttgcaacattggtacaaccaattgtagccttcattagttcattcgtaattgcttggttaattggtttggttactccaaaatatgcacatgatatcacaggtttaactgctaaaactatcaatgagaaggttaaggattagttgaaaaaggtgaaactataatgaaagattcaatgtccttaaaagatatggagtcatatcgaggtagattagaagttccagatgattttgatagtttttggagcaaagaaatcaaaaagatagaagcaaagccatttaaattaattaaaagaaattttggcgataatattaaaaacgttgttttttatgatttgttcttcaaaggtactgataacggaatagttcatgctaaatgcatttttccagcacatgaaaaaaatattccagtagttttctatttccatggttacatgggacaagctctcgattgggttgatttcatgcaatatgctgcgataggtgtaggcgttgttgcaatggatgttagaggccaacaagggcagtcggttgataacggtacttatgctggaaataccgttttaggccacataattcgtggagcagtggatggaccagatcatctgttttataaaaatgtatatctagatgtatacacgttaattgaaacagtcgcggatatgtcacgtgtagacaaggaacatctatattcttggggtggatctcaaggtggtgctttatctttgattgctgcggcattaatccacgtattaaaatgtgctactcaatacccgtttctttctgatttcaagcatgtactagaaatgggtgatcgaggattgccatatgatgagttatttaggtattttaagttttatgatccatttcataagacggaagacaagttgatgcgtactctgtcttatatcgatgttaaaaactttgctcatagaataaagtgtccagttttaatgtttacaggacttgaagatgatacttgttttccagcaacgcagtttgcaattttcaataggatagaaagccctaaaaaacacatgctgttaccagaatatggtcatgaagcaatgttttattatgttgatagtgccgcatttaactggctatttgatactaagttcccagaaaatccaccggacactagtagtaatgctttagaataaggtaaatttttaggagataaaaatgaaaaaagaagagtttattcaaaaagttcataatggattaattatttcttgtcaggctttacctggcgagccactttacaccgaagagggtggcataatgcctctgatggctaaagccgctaaagaagcgggtgcagttggtttgagagctaactccattagagatattaagcaaattaaggaagtagttcctgacctgccaatgattggtattattaagaaagaatatccacctgagaagccatttattaccgctactattaaggaagtagatgaattagctaaaacagatgtcgaagtaattgcacttgattgtacattgcgcccacgtcatgatggtaaaactgttgcagaatttattgatgaaattaagactaaatatcctgaccgtttattaatggctgatacttctaactttgaagaagcaaagaatgcttatgatgctggtgttgactttgttggtaccactttgtcaggctacactgaagaaagtcctgtttcagatcatccagattatgatttagttaaagctttggttgatgctggaatgccagttattgctgaaggaaaaatccacagtccagaacaattaaagaaaatgattgatattggaccagccggaattgttattggtggtgcaattacaagaccattgcaaattgctaagacatttacgagtgtttttgaataaatgatcttctgattagttataaatttcccctctcccaaaacaagctacgtttgtaaaaggcagacgtagcttgtttatttttggttataaagtcgaatttttatagaaaaagcgaggtataaaatgtcatattttattcatgcaaagaagttttatttagatcatggtgttgaagaacgaggatacttagaaattcaagataatggacaatttggattttattattctgaagatgaaaaaccaaaaagtgctgcaattttagatttcaagaatttctgaaaaacttcttcaatatggtgtaacaagttggatgccgaccacagtaactacttcatctgagaaattagatgaaatttgtaaaacgtttgctgcacataaagggcaggaaaaaggcgcaaagatattaggtattcactttgaaggctcatacttcactaaagaacatggcggtgcagaaaatcctgagtttatggaggatccttcaattgaagaatttgataagtggtacagagattctgatgggatgctgagaaagatatcactagcaccagaacgaaaaaatgtcccacaatttgtcagacatatcgttaaaaaaggcgtagttgcttctttaggacatactagtgcaacatatgaagaagcacgaaaagcccttgacgcaggagctacaatgtttaatcatacgtttaatggtatgaacttattatctcagcatacacctaatattattggctgtgcattaacagctgacgatgtatttgatgaaatgatagctgatggtcaccatataaagccgatcattttgcagatgttgtttgatttaaagggacctaatcatattgtattaatgactgattgcttacgtactggtgggatgcctgatggtgaatatgtgcttagtggtatgaaagtaacagttaggaatcacattgcattgttagaaaatggtaaattagctggcagcacattgactttggataaagcagtaagaaacttagtaaattgggaagtatgtaagccatatgaggcaattaagatggcaacatatactcctgcacgtagtctaaatgaaaactgtggttgtatcctgccagatagggatgctgattttaatgtgctagatagtaatcttaatgttctaaagacttttgttaatgggaaagaaaagtatagcgtaaagtaaaaatattattatagtgtgaaaaaggcataggttgtgatatgaacctacgccttttcttatagttaatgtcttctttatctacttgaataatgattttctaacaggaaattgtaaagaatttgagactgtaaaatagtttgtgtaaggatgaataattccttaaatttatttcttaaaacattagaaaaaggagttcctttctcgtatgattggtttgaacaaaaaaacacatacagaaagaagaactccttcatgaatgattttaccaaaaatatagcacaagctctattcaatcaagacaaaataaacgatttattgcgcaaagagctacaacaggctgttaataacttgctagaagctgaattgactgcctttctgggctatgatccctatgccagaaatggctggaatactggcaattctagaaatggtgcttatttccgcaaggttgatacccagtttggaccaattgaagtgcaagtgcctcgagaccgcaacggtcagtttcatcagcacacgctgcctgactacaagcagcactctgatgttttggaaagcacgattatcaagctctactccaaaggcgtaactaccagagaaatcgctgacttgattgagaaaatgtatggcagtcattatagtccagctcaagtatcaaatatttccaagcagatgctccccaaggttgaggcttatcacaagcgcaagctaagcgacaagtttttctgtgtctatttggatgcgacataccttcctttgcgccgagaaacgtttgagcgtgaagcagtatatattgccattggcattaaacctaatggacataaggaagtcattgattactgcattgctcctagtgagaacattgaagtctggacagagatgcttcaaaacatgaagtccagaggcttgaagcaagttgaactctttctttctgatggtgttgttggcatgaaaacagccttggccaggacttatcctaaagctcattttcaacgctgcttggttcatgtcatgcgcaatatctgtgctaaagtccgggtggatgaccgcgaaaagatcatgaacgaattcaagcagatacatcaacagacaagccaaaaagaagctgcagctgtcttgcatgaattttatgcaaaatggaataaagcttatagccatgttatcaaaggtttgagggaaattgagcccgatctgctggtcttctacaattatcccaaacaaatcagagcttcaatttattcaaccaacatgattgaatcctttaacaacgtcatcaagcgtaaagctaagcctaaggcagaatttccaactgaacagtcgcttgatgtatttattggcatccaggcaatgagctacaatgaccgctatttcgaccgaattcataaaggctttggtcaggttcaggataccttagaatcctattttgattaaataaatgattaaaaaatcaatttacgagaaagaactatttacacaaaagatttgacagtttcgattgttactactggtgccggcacaccaaaaccatatatgtctgatttaaaagctgctggaattaaggtaatgccggttattcctaatgttaagattgccaagaaaatggaagaaatgggtgctgatgcagttatcgttgaaggtatggaagccggcggtcacattggtgggactacttcaatggtattatggccacaaattgctgacgcaattaatattccattaatcgctgctggcggtatcggtgacggtcgtggtgttgttgaagcatttgttgctggtgctgaaggtgtacaatgtggtacaatcttttcaattgctaaagaaagcccagtaggtgataactggcgtaaagctgtcatcgatgctactgatactggtactgctgttgttggctctactatcaagggtggtgctactcgtggtattgctaatgaggaagctggcaagttgtttgaacttgaaaagacaggcgtatcaagagatgaatttaattcagcattgaacaagggactatacgttggtgtaagagaagatgaccctgataagagtttctttatggctggtgaagttgctggtctaattaaagaatctaagcctgctgcagaaattgttaaagatttaatggatgatgctcaaaaagtattgaataaaaacatcgaaatcatgtaatttaaagccattttatggctgtggaattaatacataaaatatttataatcaagcattaaataaaggcgaatgtaatttcgccttttttattattattataagttataaccaatagttatgataatgctaaaaattaatgatttcacaatgctagatgtaagcggtaccttataagtgtcaaggaattaaatgattccaaaattctactaatttgaaacatactctcatacatattattaaactcatctggtttccaattcagtagaaacgtagttagttagatttaaacataggaggataaatctatgtctgttaaagttattgacagtaaaactgcagcagaattggtcccagataacgctagtgtagctcttgatggctgccttggcactgatgtcgctgaagaaattcttgaaatgatgaaaaatagataccaagaaactggacatccaaaggatttggatgtttggtatggatgtggtatcggtgataacaaaggctcagccgttgaaaactttgctgaaaaaggaatgctccgtcgagtagttggtgggcttgggtcattagcgccaaagcttgcaccaatggttgcggataatgattttgaagcctttaatttcccacaaggtacaatttcacaattgtttagagatgcagctgctcaccgtccagttctagtaactcatactggattaggaactttcgttgacccagaaaatgatggtggtcgtttaaatgaagctgcaaagaattctactttggtaaatagaattaagattcatggaaaagattaattagcttatgaaacaccaaagccagatgtatcaattttccgtggtacttatgctgatgaaaacggcaatatcacatttgatgatgagcctttaaccatggatgttactgctgttgctatggcagctcacaacaatggtggtaaggtaattgttcaagttaagcgtgttgttaaggctggtagtcttgatccaaaggccgtcagagttcctggcgttttagttgattatgtagttccgactgataatcctgaaatgactaaacagactaccgattacatttacaatccagatattattaagtctaatattgtaaaagacgttaagcaaatggacttacctcttgataaaaagaaggttattgctagaagagctgcattcttattcaatcctgataccgaccattgtgtaaacttcggtattggtcaatatccaatgtattgcgcaatggttatgaaagaggaaggattatctgacaatatcgtaactactgttgaagcaggtacattcggtggcacttcattaggtggtggtagttttggtacagctattgctcctcaagctactattgatgaaccttacatgttcgatttctacaacggtggtggacttgacgcaacttacttaggtttagctgaagctgaccaatatggtaacttaaatgtttcaaaatttggtcctaagattgccggtactggtggtttcgttgatattactcaatatacacctaagattgtcttcactggtacgttcactgcagctggacttaaggaagaaatcaaggacggtaagttaaacattatccaagaaggtaaagtaaagaaatttgtaaagcatgttcaacaaattaccttctcaggtaaagtcgcatatgacagtaatcaagaagtttggtatgtaactgaaagagccgtatttaagctagttaaaggcggtattgaattactggaaattgcgccaggcattgatttacaaaaagatattcttgatcaaatggaatttaagccaattattagtgacaatttgcaggagatggatccgagaatttttcaagagccagtcatgaatatcaaaaacgataagaaatagttaagtgttttaattcatagggggatgcaaagttggatattaaccaaatccgttatttgctcacaatagcagataatgactttaacttaactcgtagtgctgaagtcctccatatttctcaacccgctattagtaaagcgattaaagatatggaatttaagcaacaagtaaaaatctttaatcggcgaaagggtaaaatcgttggattgacacgttacggtataactttagttaaggaatctaaaaaagtgtatgaacaatatattgaaatggtttcgaaactaaatgaattatcagaaaatagtaacggaactgttagattaggtattgcaccagttattatatcgaccgtgttcaatgatgcgttaatagcctttattaaccaaaatccaggcattcaactaaaaattatcgagcgtggagcttatgaattacaaaggatgttgattttaggtgatattgatctagctgtgattgtttctccagcgactgttgaaggtatttatgaggatttaatatacgaaaatacagttagggtttggtttaataaagaacatcgttttaatgattttactggtccgattccattctctgaaatagaaaaagaaaagattgttactctgacagatgattttatggttacctttcaattgaacaaaagatttaaaggtgataggctgaaacctaattattttcttcaaacacaatcatgggatttgattttaaatttagttcaacgtgataagaatttaattggtattgtggctgctccaataggaaagaattatagtgatcatgcaataaagaatgctgaaattacacctgaatttccttggaagatatcgatttgtcatactatgaattccactgaagatccaacagtagaatacgctaaaaattggtttttgaaatacttttctaaatataaaaagatatcaattgattaaaaattaaggaagaatcattatgaaagctatatttccaggtagctttgatccaataactaatggtcacttagatatcattagtcgtgcttcaaaattatttgataagttagtcgttgttgtttcaaataatacctccaaaaatggtatgttttctcctcaacaaagatatcaatttgttaaagacgctgtgtctgtttatcctaatgtttccgtgagccttgttcaaagtgatttaactgttaatttggttcatgaattaaatgctgatgttattgttcgtgatgtgagaaataatgaggactttgtttatgaacaacaaatagcattaatgactaagaaaatggaccccaatatagaaactttgattctattttcaaaccctgaatgttcatacatatcttctagtattgtaagagaaattatgctatttggaggcgatatttcagatgctgttcctgcttgtgtaaatcgtgctctaataagaatgaaaaatcaacatatggcaaggagcgtatcattatgaagactagaaaagaaattaccaatttaacgatcacagctgtatttattgcattgctttttatccagacatttgttccgaatgttgggtatgtaagaattcttcctagtcttcctgcaattactactattccattaaccattgctgtttatgggactttaatgggaccgaaatggggattgggttttggattagtttggggaattactcgtttagttgtggcctatacacaaccaggggatatggtcagcttgcttttgttccaaaatccagtaatctctcttgttcctagtgttctagcaggattctttcctggattaattagtcagaagtttaaagatagggatgcacatattcaaaagatagggtatatgctcagtggagcagttgcttcgctgacgaacactattcttgtaattttacttaccgatttaatgtttatgtctaattcaagcaccttaacaagttacttagggcatttttgtcagtcaactccattgttggtaattctagtcactgctctaggtttcaacggcttggtagaagcgatatttaatgcaattcttgtccctataattgttacacctcttaatttggtacttaaaagagcgtaaatgatgaataattttattactgttgaccgtaatcactggactaaattaaactctaagattgagcttccttcttatgaactattaaaaagttttattgatcaaaataagttacaggttacagtcaatgaacttcaagaagtatatatcctattagttcaatatatattgatttgcgttcaaaataagaaaatgttctctaaattaaagacaaattacattaagagtgctgatttaaaccagccatttatcctgggaattactggatcagttgctgcaggaaagtcaacgactgctaaagtaatagagactcttattagtcaattttactctgatttagatgttcaatcattgacgactgatggctttatttatcccaacaaagtactggagcaaaagaatttaatgtcacgcaaaggctttcctgaaagttacaatgtatcactattaaatgattttctttctcaagtaagtgatggggtagaggaagtttcctatcctgtatactcacatgagctttcagacatagttcctggtaaatatcgtagcattaccaatccagatattttgattttagaaggaatcgatattttgcaaattcctgaaaatgaagagaagattatcagtgattatatagatctatccatctatattgatgccagtgaaaacttattagaggaatggttcttaactcgctttaaatgtttgctagatattaataaagataatcctaataatttcttttatcattgggctcatattcctttagatgaatcaattgattatgcaaaaaaggtttggcggacagttaatttagttaatctacgtgactatattgtaccaaccaaggaaagggctaatatcattctttataaagatgtaggtcacagagtaacatcaataaaaattcgaaaatattagaagtatctctttctaagcagttcatgagaaatcatggactgcttttggttgtgtgtcgggcatggcatttgtttagtctagtgaaagtctagatcacgggtagttgtcgccaagtgtagcgaaccacaagccgttagcggtgacgctatgggtgaaggaagtggctagcgagttttccgagcctacgtacagaaacctggtcaggccaaatggtggatgagactgcagcacaagttaaagtccaaaggacaaccgtaaaaccaagacggtaaaccagggggcagtggaaaattaaagatgaatgtcttaccccgagagatctcgtggacaggtgaaaccgagtaagctttaatatcagcgatcgtaagcctggtcgaaaaaggttaatcgcgagaagtcagctgaggtcgtagtagtgctgaaggttttgtaatgaaactggagcgaagggcctaatgtttgtaagagcatatctcgctataagcaatgttcagacagtccggataagaggatagcctagcacaaagagaacgtaactctttgatggtgaaagcaattgggacaattctgaataaatttacaagtagaaatggagatatcacgagatggaactaattgaacagattttaagtcaaaacaatctcaaggaagcaatcaggagagtcaaaatcaataagggagcgcctggtgtagacaggagaacagttgatgagcttgatagctattttaaaaagcatcaagtagaaataaaggacgccatcatgaagatgaagtatcgtccgcaagctgttcgcagagtctacattcctaaagctaatggtaagaaacgtcctttaggaatacccacggttgttgaccgagtaatccagcaggctattgcccaagtattaatgaagatctatgatcctcattttagtgagcatagctatggctttagacctggacgcagtgctcatgacgctattgaacaagtcttggaatatttaaacgaaggctatcaatgggttgttgacctggatattgagaaatactttgacacggtaaatcatgataaattaatttcaataattagagagcaagtaaatgacaaaaccaccctccatttaattcgagcctttcttaaagctggagtaatggaagatggttgggttaagcctaataaactaggtgtaccacaaggcggccctctttcaccaattctatccaatatctatttagataaaatggataaagaattggaacaaagaggcctgcgctttgtccgctatgccgatgactgcaatatctttgtcaaaagcggtaaatcagccaaacgtgtgatgaattcaatttcatcatggctagaaagaaagctattcctaaaggtcaacgcaaccaaaaccaaagttgtacgaccaaccaagagcaactttcttggctttaccttctggaaaagtggcgaatactggcaagcaaagccaggagatgaccgcaaaatcaagctttatgacaagatgagagaacttctctgtcgcagaaaagcagctgctcagcctctatcactagtctttactaagataaatcaagtagttagaggctgggtcaattactttagagttggcgacatgaaatattttctaattaagttcagtcaatggctgcgtcataaagtacgggtggtaatcattaaacaatggaaactaccaaaacgaatatacattaacttaatgcggattaacaaggcactaaagtgcaattttagtgatgaagatattcataaagtagctaatacgcgcttaggttggtataaaagaagtacgggtcatgtcattaactttctgcttagcccaaaagtattgggcataagcaaagcggatcgcccaggcttggtcgatccgctagaatattatttatctcgtaaataatcacaaacgtagcgccggatacggaaccgtacgtccggtgcaatgagaggggcgagttataaaactccctctactctattaatgtccgtgatctcatcggggtgcaaaacaacatatacgaactagatccacgatagagtataattaggttgaaaacttaaggcagaatagttgtagagtggagggaaaaatgacaaaatatgtggtaaatagtgaattaagcgatactgaatggcaaattgaaaattcaactgccagatatcgctttatagctgacaatggtgataaaactggaggccctgatcctgttgaatatttaactggggcattaaattcttgtatgtctatttcagctggattgcttattaaggcgcaccatctggacgttcaaaattttaagattaatgcggaagcgaataccgagagattatcacacggaatgccagatgttgatacgataactatcaaaatatcatttgatagtcctatgtctcatgaagatcaagataaatttgttaaagatattttaagagtatctactgtctatcaaacgttgaaaaaagcgatcaagattagtattgagtggaattagcctaagttaaaatgactagtacgaaagaagcactgaagctaaagacaaataattctaaatacaatgcagtagtaaggccatactgcaatatcaattaataaagcaaccagtgtagataaaagatctatactggttgcttttgtttgatttaagttagtgacagtatcattaagttaagacattgacaaatttgacgcttttggaaccgaatcattttgattcggttctttttctttttacaataaaataaagagtgagcagaagtctatatctgcttactcttttgtctcttatcaatttttttataaaaagagcgtagttctcatgaaatcccttcacacaaacattttaaaactgatgaatcagattatcgataaaattcaaaattcattattgacaaaacaataaaataagattagcataatattaaaattatttaagaaaggagctacatatcatgttagaatcacaaaattcagcaacagtagaattacgccgccgccaccaaaatgatggtttattttgtgatcctaaattatggtgtgcggcgaattttgtttaaaaataattaattaagttgattactaagcaaggttcacattcctaattgggatgtggacctttttttgttacagaaaagagaaaaaactatgaagtcaattaaattatttggttcaactggtctacttattggtgctgctttaactttagtagcatgtggtcaaagcaatacaaatgcagcaaaaagtgcaaagaaatttcctgaacaaactgtacaaaaaactgcacagaaaggtggcactttaaactacgcaatcgaaacagatacgccttttaaaggtatttttgatagtcaattatcagttgatcaagttgattctgatgtcatgcaatttggtaatgaggggttattcgatactgataattcatatcaaatacgcgtggtgctagttaaatcgttttagttaataaaaaagtccaatcggattagactcaagttgtaagtaaattaaatagaaaagagtctgatctaattgaactacctcaagcttaatcgtttctctcaccatttacaagttagttttagtcgtttaaatgtaatttgtcgttcactatataatctttatgcgcctgataagcttacgcatcgaaaaaacattgatcaaacaaagctttccgacagctccatcttagcgatgctcatttggcaaactgaaattggaattgaatcccaaagaagattctgtaaattttttgttggcttatctcattctcgctttaatcgtcgagccaagatgcttttgcctttaattcgctgcatccgtcaagcttggaatcaagaggtaaaggttgctggagaatttttaattattgacagttttcctgttccagtttgtcagcctgttcgtaattatcgtgttaagatcttccgtgacatagccgatattggctataaagcaaccaagaaagtctattattatggtttcaaggtgcacgcgctagtaagcgatgatggctatttgcttgactacgcagtcactaaagcatcagtgcatgatgccaaagaaacagtagaattgatgattaatgctcatccaattaaccattatcttttaggcgatgaaggctacttaggaaaagacttagctgccgagttaaaaggtatgggctatgtcctttggacaccatatcgaaaaaacatgaaaggtgctaaaaaacataataatcatcaactgatggcaattagaagaacaattgaaagcgacttttctttgctcagttactataacgctgaaaataaccgagcaaggagcttagctggctttcagcagcggctagaaatagccattttagcttataatatggcatattgcctagaacgatttaactagcaccacgcgtatatcaaattaataataaaggacctgctacttttaaacttgataaaaatgcaaagacaattactattacggtaaaaaaaggtgttaaatggtcggatggtaagcaagttgtagctaaagacttagaatatccatatgaaatgactgccaacaaagcaactaatagtttacagtattcagattctttagaaaatattgttggtatgaaagcttatcacaatggaaaagcaaaaactatttctggtattcaatttcctaatggtgaaaatggcagaaccattgtcattcattttctttcaatgaagcctggtatgttgcaatcaggtaatgattactttattgaaactgctgctccgtatcattatctaaagaatattcctttcagtaaattggtttcatcagatcaaattagaaaaaatcctatcttttttggcccttataaagttagcaaggtagttagaggacaatctgtaacttaggttccaaataaatattactggagaggtacaccaaaattaagcaaaattgttgctcaggtagtttctactaattccgcatcccaagctattaagagtcataagtttgatatagccgatgtggtaaattcacaatggcaagcagttaaagatgcgaaagatacaaaattcattgctaaaattcctcttgcttacagctatctcggcttcaaagtgggtaaatggcaagatggtaagaatgttatgaatcctaattctaagatgaatagcaaatctttacggcaagcaattgcttatgcaatgaatattaatcaagttgaaaagagatacacgcaaggtttgacttttagagtgccaaccttaattcctgaacaatttggtgattactttgataaaaattctaaaggctatccttacaacttaaagaaagcaagtgaattgttagataaggcgggatataagaagaaaggcaaatggagagttcaacctaacggaaaaccattgagcattcatttagcagctatgagtgggtccgccgttcaagaaccaattattcaaaactacatccaacaatggagaaagattggacttcatgtgagtttaactggaaacagattaatggaattcaattctttctatgataagttagaccaagacgataaaaatatagacatgtttattgcttcctggtcattgtctagtgaaccatcacctagaggaatctatagtgaaactagtgcaatgaatgactcaagatttgtgacaaaagagaacaacaaattactcaatgaaattgattcgtctaaggcgtttaatcatgcatatcgggttaaggcctttcataagtggcagcaatatatgaatgatgaagcttatattgtgccaatgactaattcttactccattaaggctgtgaatagcaagctggttaactattcacttaaaccggctgaatcaaattcgatttggtataaggtgggatttgctaaataatctttcttaagaaaaattcccttccagatgattgaaaacgatcaagattttcttttttgagaatcttggtagttttttatgatttgtaattttataaatgattaggcagtttgaagtctatatgtgtatatttaaattgtataaaatctccttaaatgctgatataacaaggattatttaatatagctttttagcctaatgaagataactatggttatatttatataatatattatatattttagagcagaagtaaaaaaattcgaaattgtttattaattatctgaaaattgaaagcaccaaaatcaagctcaagtcctgtcactattgagctttcttagacgtaattagtttttatatgatctgtttcagtgcaatttgtatgaatcgtggcagttggttaataaagtcattgattacttcatctatcttttcaaaactattctgtttaagctcttttaattctgaaattaagtagaccaatgcatctacgaatctaatatcaggtaaggattcgttcattagatagaataaatctccgattgtcttatcatctgtattttgtctttcctgccaggtcaatagatcataagttattgctgtaactgcgatatagccacattggccatcatagctttgaacttgagatttatctaaagcaagatattgcttagacgtcttaaaatatgtttcaatttgccatctacgaccataaagttggatgatttcttcagggctaagctttgtctgagtagtagctaaaaccaaatacttgttcttgtttccacggttggagacaaagacgagctttaataaaaagctatgtccatgatattgagcctcaactatgcttgaataaagataatgtttctttttacggatgtttgaagcagccaaacgatcatacaagtctttaacgctatagcggcaatggcgataaatgtaataaatctttgaactcttcttgatcatgccaagtccatctaaaccgatcttctttaaaatccaaaacattcttggagaagaaaaccaagaatcgaataagacgtatttagcttctactcctaatcgtaaggcttgtctaatcaactctacagttacatcattcatctttctctgagcttgatttctccttttaccagaaattgaacgttcatcagcagtaatgggagcagctccaatcatatttttcttggttttggttgacatcaaggcaaagttaaccggcaagaaggtattgccatcgctccagcctaaagttaaaccacgatatccgttcaaatactcatgcttgtcatggtcatagactttagctagcaattcggtctttttagaaaaagaccgagccatcagcgtatcgtcaacgataaaagcaagtcggcgtcttttatcgataaatggttttaagcagccaatgagccgggctgcaatcaagcataatagtttttgcagttgattcttccatcgttaagtacattgcgagcagttctaacggaaaaacgtttgtcatccttagctctgaataaagaaagccgagcaaaatgtactgacatcagccaagagataatcatggttaatgaaacggtggatttacgcttaaaattgacttgtttagttaacttagctagaccaattagattaataaatgaagaaattaaggatttagtatcgttttctgtgtcgatttgttctatactgttcattgcgcaggatctcctttactttttaggtcgacacttaaagtataacgcagagagatcctgcgtttttatttttgataagaaaaagccaagaggcgcggggaaagagcgttaatcttagctttcaagtttcagttaattatatagaaatggttatttaatttgcttaacctaatgctatcgcatttgaaagagctttcaatatcttttaagatgttatctaggtttgttattaaatatttacgcatatagacttctttatttaacctgctaccctattaagtgaagagacttataacgaagtttaagaaaccgactacttcttaaataaatgagtttaaatttaaagcttgaaaataataaggacttaaaaatttcgagctttcataaataataaataggggattaggaaaatgaaaaagagcattaaacttttatcaacaattagcattgccgttgctttagcaggtggtgcaattactgcagttaacaatcaagaaacttcaaatgttgatgctgcatcaataacattaccttctggttacaccaaggatgccgttatcaaatggaaccaaactggtaaggccagcaaggctttggtaaatgcctcaattaagggtatgaaagaaaataatgatagtgatgctggttcagacaacaccttggttaatgtaactaagttaactgatagtcaaaaagttgaattaagcaactacactttggaattgattaattctgctcgtaatcaacttggcaagcaatcttggacttacaagcgcggtgcattaaattttgctgaccgtgtagctaatcaatattactcaaacaacaagtcttgctgggatcctgatcactatgttactggtattgaacgtgcagccaaggcttcaggtcttaactcacgtgttggtcaagtttacgaagatgaagcaggtttgccaatttcttcagaatttaacaccaactaccgtacaatgtcggctttgaagagccaaatctacttcaacgttaagcagatgctcttcggtggctcaagtagccaaatgggcgatgcttctaagtatactgaatgggaacacgctggcgacttgcttggctgccgcactaagcgctacatccaaaactacaagaaattcaataattaatctgacgttgtagtttgaaactaaaaaagtttcctaatccaagagttcaaacggtttagtcacctgtctgggctctttttaatttgcttaagaatattttgaataatatgattaaatttctattatgtgagattttttcaaaatgtggttgactgtaaacaacaaatagtaaagaatacagttaatgaaaagcgaggaagaacttcataagttagtggaaaaggttattgatgattttgctgcttgggatgaagatgagcgctataaggagccagaaaaagaactacgtcagctgttggaagatagtaaggtcttgggctttataatgtacactagattgagtgatattctgggttggcatcatcgtatgttgactgaagccaaggaagagagaaccttaacagctaaggaggaagtattactgaatgacatggatgcagttcatgatttgatggaacgaaccatggatgaagagaatggtaggttgtagaaagcattaaaattacagaaaaataaaaccacattgctcaaaaattgaagtgagtaatgtggttttttacgttgtaattattgtagtagccaatcaataagattgattttttgaatcccgtcgtagttggctgtgggattgatagtatcaagggttagtaaaagtttggaatgaactccaaacaaatgacatttattgctgctttttggagtcaactccaaaaagctgactttatcgttttgatggaattgaataggggcaagggagatattgtaaaagcgagtgtcgagtaaatagtgaactgagacctaaaagttagacacttttaggtctttttctacgtaaagtcaagcataataagaagtttgacttcattttttgtttaaatttcaacttaaacatcttttagtgtcgatttatttttttagttagacacgacaaataagcccagatccatatctgatttttgggcttagcgttataatgtacttgatcaattaattacgactaaagtctttttgattatgtgtggctacgttgtaatcatatggttgatcattgataatcagggcataaatggttctgattagtttatgaattgaagcaatagctatctttttgaaccctttggtttgagaggatagctttttgctttcataataatctgctatatgacacggatttgtcttagctgcattatcaatttgtccaatagctcgataaagcaacttacgtgcgactgcattgccatgtttagtaatacttaaattagagtccatttctcctgactgatatctgcctggatcaattccgataaaagcattgattttattaggattactaaatctgcgtaaatctcctaactctgctaaaactctgacagcagtggtctgtgcaaagcctggaatgctttctaggttttctaaatcatgattaggcaaagacttcgctaacttaaccattcttgcgattaaattttctctttgatcacttaaattaagcaatctgtgtgcataatactgcacttgctcgacttctatgctagagcaagatacaactggataagcttgataagctaattcaattaatttatctgcagtccttagagcgtgtttaaaagcaatcccctttaagctcattaaccagttaataagctgttttttatcttctcttcttactaagtcacaatgaggatatcgcacaactatttgccagtaatttttacctttagcagaagaaaatagattttcaatttcaggaaaagtcgattgtagagcttggtaaagtcgatttttagccattactaagtcagctgttaactggtcatagaagcggctcaaagcattaagctgcttataagtttgagattgaagttgattaattggatgatgatatagtctttgaattaaggctaaatgataagcatcagttttatcagtcttattatgacgtagtcccatatccatttcttttttagctttaagaggattaagaattacataatcatagccatagtcttccagaaaagattgcagtgtacgtgaataaacaccggtagcttcaaaaataatttgcggatgtttagaaaaagcggttaattcatgaagcaattgaataaaaccaggacgattattagtaatggttagttcatttttgctttcaccaattagttcacaaacagtagaagtagacttgcttacatcaattccaaaagtaacttgcataataaaaacctccaaaacttagtagtaaaacgtatttacttaagaaatcagatctaattttctaaactcgacatctagtgtccacattcttcgaagagactattgaaaacttaagtaaaactgccagtttattatgcgacatcaagtgtctaaagacctcagggcatatcgttttactactactttaattctacaaaagaataaaaatagtgaatcaattatcccgtcggataactaattcactatttagcttagaatgtttactatgtctaaatttaataaagaacaaaaaatagaaatttatcataaatggaaagatgaaaatatctcaatcagtcaattggctaaagcgtacagaatgaatctagctaatttagactatatgcttagattaattgatatgcatggaatagaaattttaactactaaaaaccaaagctattccaaagagtttaagcagcgaactattgaacaagcaatctttggcaataaaccatacttacagctgcctttggaactggggtttaaaagtattggcatgcttaacaattggattagagaatataagaaaaacgggtataatgtcattatcaaacagaaaggacgccctgcccgtgaccaaagaaaagcagaaatctcgcaaggaactggagaaagagatccagcagctgaaagaagaaaacttgcgattgcgtattgtgaacgaatacgtaaaaaaactaagtgccttggatcaagaagatcagaagaaatagctagggtgattacggatctaaggcaagaattcaaagttagtttaaattatgtattagctgcgattgcagagcaccctgagctacctataattgccagaagctcatactacaagattatcaaacgacagcccgtcaagcctaaacggtcaaagcttattgctagaatccatgagatttttaatcatcatcaaggccgctatggatatcgcagagtagctttgcagttaatcagagagggctggaaagttacggagaaaaccgttcgctattggatgcataaattaggtcttaaaggcatcaggcgcaataagcgcaaatattcaagctataaaggtactattggcaaaatagctccaaatttaattcatcgtgatttcttcgcagccctgcctaacacaaaatggtatactgatatcactgaatttcatcttaataatgaaaagctttatttatcgcctattctagacggctgcggtggcgatatagtttcttatactatctccaaacatccagatatggatttagtaatgacaatgcttgacaaggcttttgccaaagaaacagctcttaataactgcatttttgatactgatcagggctgtcagtatcaaagccctcgttatcagcgagctttaaaactccatggtattactcaaagcatgtccagaaagagcaactccatggatgatgggctaatggagaacttctttggcctgctcaaaactgaaatgttctatgatcaagaatacaagtatcataatcttcaagaattaactcaagcaatcgaggaatatatcgaatactataacaacgaaaggataaagagcagattaaaaggcttaaccccgaaagagtatcgaagtcaagcctctattaatccaatattttaattgtctactttttacgtctcagtacatttttacattaattactattatttttcttcttaattagttaatttaaaaagttctggtcaaaacctgacacctttgacacttttcctctcaacaccttgatactactagctttatccatcatatctccattgacaccaaaacaattcaaaagctacccaatgcttgatataacaataatctgctagtgtcaacttaaccaacaccagaccgacaccatttgagttaataactgacacttttcaaatttcaagattcggtgtcaacaacggtgtcgcacatcgactaaaatgtgtcagctaaaccgacaccaaattttaacttggctatgtagattctcaaccattcgcactatattaaatgcaagcctgttcaaaaacttttagctttttgaatgaacgtgctgggcctacaacatcaagcttaaatgatgttcagaaacttatggtcaaaaaggatggattgaaatgacggaatatggctatgctagggtgtctacaaagggacaagaactagcagatcaaattaatcaattgcaaactgctgggatcagtgaggattgcattttctccgaaaaatttactggaactacaactgaccgaccacaatttgctaaactaactcaattggcgaaaccgggtgatgtgattacggttaccaagctggatcggttagctagaaatacccgggaagcattaaatgttattgacccactaatgaatcaaggagtgaagatcaatgtacttaacattggcatgttggaaaactcaactgtgggtaaattagttaaaacaattctcttagcagtggcggaaatggaacgggatatgattgtggaccgcacccaataagggaaacgttatgctaagttacaccggtctgattatcatgaaggacgaccccaaagagccattaccccgcactaccaagccgcttatgagtacttgcttactcattcctacaaacagactgcgagtgcttttgatatttcgatttcaactttgcaacggatccgaaagcaggtggagcaaaataatatagcttagttttaaaaaagtatatattattttgcgctggaggatttgaaaaatggtaaaatgttataccccatttatttactggattgatactaccggtctagactggcaaagcgatgaaatcattcacctaaccataacggatttatttggtaacattgtgttctcacatctgtttaaaccagtgaaaattgaaagttgggacccaactcagcagggtttccacacaaaagcacttgcccccccacatattcaatatataataaattacgcgtggtgctagttaagtcgttttagttaataaaaaagtccaatcggattagactcaagttgtaacttaaattaaatagaaaagagtctgatctaattgaactatctcaagcttaatcgtttttctcaccatttacaagttagctttgctcggctaaatgtaatttgtcgttctttgtacaagctttgtgctcctgatgagctgaaataccgtaaaaatattgatcaggttaagctcttagacagttctattttagcaatgcttatttggcaaactgaaattggtatcgaatctcaaagaagattttgtaaattctttgtcggtttgtctcattctcgctttaatcgtcgggcacgaatgcttttgcctttaatgcgctgtatccgtcaagattggaatcaagaagtaaaaacagctggagaattcttaattattgacagcttcccagttccagtttgtcagcccatccgcaactatcgcgtcaagatctttcgtggcatatctgatatcggatataaagccactaagaaaatctattattacggcttcaaggttcacgcgatagtaagtgatgacggctatgtgctttggacaccatatcgaagaaacatgaaaggcgctaaaaagcataacgatcatcaactgatggcaattagaagaacaattgagagcgacttttctttgcttagctactataacgctgaaaataactgggcaaggagcttagctggttttcagcagcggctagaaatagccattttggcttataatatagcatattgcctagaacgatttaactagcaccacgcgtaataaattgcgtcttagaaagaggatataaaatatggacaaattacataagcaacaagtagcaaaacgacaacgatttgccattaagaaattaacagttggaacggcatctgtccttgttggcttaaccttcattattagtggtaatgccaaggcagatacgacagttgctgctcaaaatacattcacgactcaagtgactgatccacaagttagtgcccattcaagcaatattcggattagcgacgaatcaaatacggttgttcatcaaacttcatcaacattagttccaaataaaacaacaacgccagcgcaacaaatgccgataatccataaaacacagcaaaacaaccactgcccagtaagtacaacaaacacagcaaaacaaccactgcccagtaagtacaacattactatgaattttcgcgatgtcaccctacataagccaattcaagtgattagtaatggtcattatgtattcaaacaacctttcaagcagaccacaattcgaccaggggatagtgtggatcaagaatttactgtggccggttataaattaatgaattcagaagttttgaataagtatttctattttgataaacaaggtaatgcctgccttaagaaaggtattactacgcaagacattaacattaatttagattacgcatcattgtcaccaatcaaagtagagtatgttgatgtagataacgggcatattttagcatcaatcgttctagatagtttctggatggcccctgaatctccacaacaccgtgctggtgataagaaagcaccggatgcatcacgctatgaagccgcagccattaatattcctggatataaattagtttctgaacctgttttaaagggtaaaatcactggtcaaactcgaaattcgttagctgatcctaactatgtttatttaactttcaagtataagaaggttataaaaaataattctgatagtaataggactgaattgttacttgttccagaagaaacaaatctaccgtacaaattctttacgattgctggtagctatggcaaaaggattgacctaaacaatggtaattatgagaaaaaaatgagtgaggagattagccattacgaaaaacaaggttactcctatataggaagtacagggacatatcttaattctgattatttcaattggtacgctaaggggatacatgtttacttgctaccaaacaaaccagtaactgtgaggtacattgatgagcaaggaaatgtgcttaggaataatgatacgcttgcgttcaacctagataatcctaaccaaaaaaataatggggttaatccgcaaaaaggctggtatgcaaatggtccatggcaagtccaacctaagaaaattaaaggttatcgtcttgttcgtactcttggagtaacgagtggccagtatactgtataccaatacaccacaacttttgtttacactaaggacacagatccaactgatcccaaaacgccagagacaacaacaacaacaacaactgatccaaagacaccaagcgataagcttccggacaatcctggcaagtctggtcagacagttccagttaatattcacattcctgatggttatcaattagttcctggtgaaagtgttccaacattttacaccttcaaggatggtaaccctaatcaaatcattagttgttggttgatcccaactaatggcggtcaaccaacaactaatgatcatcaaggacaaggaacaccagctactaatacgcctacaaacactactcctaatggaaatgctgttactggcaaactagaaggtaatgttcctaacatgcaaactgggaagacgattacgtttcaaccaacgacagctaaggataaccaactaccacaaactggtaatgacaatagcttaacaaccgttgccgggattattgtaagcctgttaaccagttgcttagctgttcttggcattaataaacatcaaggctaatatgattacctaccaaccattccgaagctaatcaagacgcgatgctttaattagcttcggaattttgaatgatatatcattataataggatggaataaactttatataaatataagtaatggggattgatttctaatcttttaagaatactgtttatggttgattttttatacaatgtttccaactgagagtaaatataaaaagggagatactatgttatcagcaaagaattattacggccgtctggtaaagttaaaaccaaaacaagatcatttttcacttcgtaagttatctattggtcttatttctgttaccataggtattaccttatacttgggagtggacaactcctatgttatggctgatacgaatttgagggataataacaatcaacaattagccggatcgggtaatggcaccaatataataaatgataaagttaaaattccaaccggtgcttttcagtctaaacaaatgcaaactgaaaattgcaaagtaaataatcagatgttggataaaactgaagtaacaaattctactaaaaattcttctacactaaatgtggaaaattccaagactgctgatttgtcgagatttgattactctttatatacaaaaaaagtaaagagttttgaatttagaaattcagataataacgatgtaattagaacagtaatattaaacaaacctaccggtgttgaaactgtaactatgactttgaatgttagctgcttaaaagggagaaagcatcagcatcgatcgcacacatctgctagatcgagtatttataattataaacctcaagttattgctgaagtaaatacatccaataatccattgccaaaaatatcaattttggagaaaaacgttttaccaaaaactttttttcaagtagataagaatacatttcttactcaacaggataaagagaactatgagaaatttatatcagttaataagaatgatattagcatagaattaccagctttttccattaatgatattgatattccaggctattcttatcatattaatgcaaaaaagactactcctggagcaggattaggtaaagaaaagttttacatctacactgaatcaccacaaacagttgttatcgactataccccgattacggttaaggttgaacataagatcatcacggtaacaccaaccgatccgaagacaccaagcgataagcttccagacaatcctggcaagaactatccaaagggtgttgataagaaagatctgaacaagactgttaagcggacgattactgttaataaaccagctggctcaactgttgatgctagtcaagagactactctaactcggacggctactgttgacgaggttacaggccaagttacgtatggcaaatggacaacctcaaagcttgataagtataatgcaccagaaattccaggttacactccaagtcaagcagaagtccctgcagttgatcaggtaacggttgattacacagatccaaaaattgaaattacctacacgccaaccgaacagactgggaagatcacatacgttgatccaaacggcaaagaagttggtactaccccattaacaggaaagacggatgaagagattccagttacaccaaacgttcctgcaggttggcagattgttcctgatccaaagattccaacaaagatcaccgctactccagacggcattcaaacagttacggttaaggttgaacataagatcatcacggtaacaccaaccgatccgaagacaccaagcgataagcttccagacaatcctggcaagaactatccaaagggtgttgataagaaagatctgaacaagactgttaagcggacgattacgtctcaaccaacgacagctaaggataaccaactaccacaaactggtaatgacaatagcttaacattaatgggcttaggtgcctccaccttattgggaatgtttggccttgctgctgtaaacaagaagcgtaagtaatcaaattagctctacaattttatccctttgtcagtactgatgaggtattttgatgaggttagtttaagtagcgaagctgcttgagctgaccttttcttttagcttagtttttaccatgagatttgagagctagtagacttcggatacgggaatgatcaaagttgcgaaaaccataagctgttattctagtggtcttaattttattattgtaagcagtcgttatcaatacgggttgaacaaagggactctacaattgtaagtactgatgaatttaacatcagtgcttattttggttttctacgaatagtcaaggatattaaaggaattccttggaatttagctggatagaaaagttaattaaataattaaaatggctcaaagttaaatttaaagtataacaaaacaagctcatgaactagatttattgaacctgtcaaatcttttgtgtaaatagttctttctcgtaaattgatttttgaattatttattcaaaataagattctaaggtatcctgaacctgaccaaagcctttatgaattcggttgaaatagcggtcattgtagctcattgcctggatgccaataaatgcatcaagcgactgttcagttggaaattctgccttaggcttagctttacgcttgatgacgttgttaaaggattcaatcatattggttgaataaattgaagctctgatttgtttgggataattgtagaagaccagcagatcgggctcaatttccttcaaacctttgatgacattgctataagctttattccatctggcatagaatttgtgcaagacagctgcagcttcttttttgcttgtctgttgatgtatctgcttgaattcgttcatgatcttttcgcggtcatccacccggactttagcacagatattgcgcatgacatgaaccaggcagcgttgaaaatgagctttaggataagtcctggccaaggctgttttcatgccaacaacaccatcagaaagaaagagttcaacttgcttcaagcctctggacttcatgttttgaagcatctctgtccagacttcaatgttctcactaggagcaatgcagtagtcaatgacttccttatgtccattaggtttaatgccaatggcaatatatactgcttcacgctcaaacgtttctcggcgcaaaggaaggtatgtcgcatccaaatagacacagaaaaacttgtcgcttagcttgcgcttgtgataagcctcaaccttggggagcatctgcttggaaatatttgatacttgagctggactataatgactgccatacattttctcaatcaagtcagcgatttctctggtagttacgcctttggagtagagcttgataatcgtgctttccaaaacatcagagtgctgcttgtagtcaggcagcgtgtgctgatgaaactgaccgttgcggtctcgaggcacttgcacttcaattggtccaaactgggtatcaaccttgcggaaataagcaccatttctagaattgccagtattccagccatttctggcatagggatcatagcctagaaaggcagtcaactcagcttctagcaagttattaacagcctgttgtagctctttgcgcaataaatcatttattttgtctggattgaatagagcttgagcaaaatctttggtaaaatcattcatgaaggagttcttctttctgtatgtgtttttttgttcaaaccaatcatacgagaaaggaactcctttttctaatgtttaaagaaataaatttaaggaatcattcatccttacacaaactattttacagtctctccaaagagtttaagcagcgaactattgaacaagcaatctttggcaataaaccatacttacagctgcctttggaactggggtttaaaagtattggcatgcttaacaattggattagagaatataagaaaaacgggtataatgtcattatcaaacagaaaggacgccctgcccgtgaccaaagaaaagcagaaatctcgcaaggaactggagaaagagatccagcagctgaaagaagaaaacttgcgattgcgtattgtgaacgaatacgtaaaaaaactaagtgccttggatcaagaagatcagaagaaatagctagggtgattacggatctaaggcaagaattcaaagttagtttaaattatgtattagctgcgattgcagagcaccctgagctacctataattgccagaagctcatactacaagattatcaaacgacagcccgtcaagcctaaacggtcaaagcttattgctagaatccatgagatttttaatcatcatcaaggccgctatggatatcgcagagtagctttgcagttaatcagagagggctggaaagttacggagaaaaccgttcgctattggatgcataaattaggtcttaaaggcatcaggtgcaataagcgcaaatattcaagctataaaggtactattggcaaaatagctccaaatttaattcatcgtgatttcttcgcagccctgcctaacacaaaatggtatactgatatcactgaatttcatcttaataatgaaaagctttatttatcgcctattctagacggctgcggtggcgatatagtttcttatactatctccaaacatccagatatggatttagtaatgacaatgcttgacaaggcttttgccaaagaaacagctcttaataactgcatttttgatactgatcagggctgtcagtatcaaagccctcgttatcagcgagctttaaaactccatggtattactcaaagcatgtccagaaagagcaactccatggatgatgggctaatggagaacttctttggcctgctcaaaactgaaatgttctatgatcaagaatacaagtatcataatcttcaagaattaactcaagcaatcgaggaatatatcgaatactataacaacgaaaggataaagagcagattaaaaggcttaaccccgaaagagtatcgaagtcaagcctctattaatccaatattttaattgtctactttttacgtctcagtacagtgctttcgaggcttttcttttatattattttttcttagaaatagagtcacggatatttaattgactatggcaagtgatcgtaagtggaatttgaatatcttccgtaattagatctttagccaaacgaacggcagtcttgcccatttcttcagtattcatatagacactggatagggtaggagttaagaagcgattgatatctacatcatcaaaactaacaacagagatatcgtcagggatgttaacacctgcatcactaaaggctttataaacacctaatgccataggatcactaccgacaacaacagcagtaggacgttgttgcagttttaagatctcttttccagcttcaaaagcagagttagttgaccaatcagtaataaaagaatggcagtactggtcaagattgtggagtttcatccaggacaagtaagtgagttcacgtagatcatttttttcacaagcaatcttaccgtcaagatcaagaaccaatgattttccaccgatgtaaacaatgttcttgtgtcccaggttatagagggtatcaagaatatgagaagtttcttccacaaaatcattacgaacgatattacaattatgaatattggtgttgacgtcgataaaaattatatggggattaatgctttgaatctgcttaattgctacaggtgtcatttcaccctcgattagcactgcgccaaatttagctaagtcagcccaatttttattatcatcttctattctaaaaggttgctcaatacgtaaatgccatttcttggcttcttcattaatgcctttatgcagattgagaaaatagggatcggtgatttcacgagatttgttataacgcatgattagtgcaatcgagagctggttatcagtttgcttgggaccaggatgtttttgagatttcgaataatgcaggcgtttggcggtttcgataacgcgggcacgactagcctcattgattctaaaagttggatcattgtttaaaattcgtgatacgctagctggcgataccccagcaatacgtgcaatgtctctaatacttgccataaagatgctccttgtttgtttactgtttacattatacaacttttagcaagaaactggtgtataccgaacttgaggataatagtttagtgtccataaagtaagtcatattgaatcaatgttacttactttatggacactaaatttacttattttactacactacatagtaaagtgtagtaaaataagtaaaaaagcaattgaaaaagaagaatatggaaataataaaatcttaataatttgttcgcttgtttttatatttgtaattcattaaacttatgttcgaaataatgaaaggagaaatatatttttcaattgtaggtaatataattccatattcgtatattgacagtacttatgaaacaaaaatcattgattagtcaactagcaaaaatacataacggtacaattactcatcgtgaattagcattaaatggagtatcaagttatagtatttcgaaagctgttcaggatggtacgttagaaaaaatacgtccgggaatttatttatttggtgatgataccgaggatatattttatagtttgcaacaaaaatataaaaaaggaatctattctttagaaacagcattatatttatgggggttaagtgatcaatatccttttagcttagatatgacttttcctaggggctacaataatccaactttggatattgaaataaatccacatattcaaactaaaagtttggctactcagggaataactcaaactgaatcattcaatggaaatgtgattaatctctatactcctgaaagaactctagctgaaatattgcgaccgattaatgctgtagatatcgaaataattaccaatgccttcaagatgtggaataaggaaaagaaaaaagacataaatacattaatgtcttttgcagaaaagtttagggtaactagaaaggtaaatagctacttagaggtgttgttgtgaaaaattatgttgatgagaagcagttcaaagcagatgtaagaaggtatgctagagagcataatataaaaggaaatgagattggtcgattatggcaagaaattatgttagatgatttgctagaaagaatttcagtatcaaaatatcgagataatttcattttaaaaggtggttttttgttgtcggctattgttggtatcgataaaagatccacggaagacattgatgctgagataaaaggattagatttgaccgaaaaacaaatagctaaagtatttgaagaaatctgtcaaataaaattagcgggggatctattaagcatttcgttgtcagaaattgaacagattcatgagcatgaagagtacaagggctatcgattacattttaatgcttcttttcggaagataagatatccattaaaagtagatgtttcaacaggggatgttattacacctagggagattgaatatagctataaattacatttagaagatcgacatattaatatttgggcatatactatggaaactatagtagcggaaaaattagaaacggtaattacgagaggaatagctaatacacgtatgaaagatctctatgatttattcatactgcagagagaacgaatcaatttagctactttaaagtcagcttttgctaatactacgaattaccgtgaatcaatcttttggacaggacaagatatagattataagtattgtctaagacaagtagatattattgctgaaaatagtaatatgcagaatctttggaatagatacgtgagaaaacatccttttgctaagggaatcacttttactcaagttattcaggcagttcaaacttggctaactaaattagagtttgaaaaataatttcaatcaaaaatgacgctagttgatcgaaccagcgtcatttttttagataatagatgtagaaaatagtttgaaaaacgattagtttttatagaaatctttattatactttacttgtcttcgtagccctttgggtgactcttgtgccagttccaagcagttgcgataacgtcatcaacactttcatgctttggcttccagcccaaaatagttcttgctttggttgaatcagcaaccaaagagtcagggtcaccgccacgacgtggacccattgtgtaaggaatatcaatccctgttacttttttagcagcgttcaaaatttcaaggttggagtaaccttgagcagtacccaagttaaagacatctgacttattagtctccatcatatgtttcagtgccaaaatatgagcatcaattaaatcttcaacttgaacgtagtcacgaacgttggtaccgtccttagtgtcatagtcatcaccaaagatagtaaacttaccatccccagaaattgcactcttcaaaatatttggaatcaagtgtgtttctggtgcgtgatcttcaccgattgtgccatcacttgcagcaccagcaacgttgaagtagcgaagagcagtgtacttaataccatcagctttatcagcccaagccatgatcttttccatcatcatcttggtttcaccatatgggttgattggatcaagtggggtgtcttcggtgattggcaatttcttaggaataccataagttgcagcacttgaagagaagactaagtatttaacaccagcgtcattcatagcttgtaataatgaaatcatgccagtaacgttattgtcatagtacttaagtggctttttaactgactctggaactaatgaatatgctgcaaagtgcattacagcatcaatcttttcatcacgtaaaattttgcttaccaaaaaagtatcttcaatatcgccttggtaaaacttagccttaggatctacagcctttctgtgaccagtatataaagcatctaagacaacaacatcattgccttctttaactaattcgcgtacagcgtgtgagccgatataacccgcaccaccgacaactaaaactttcatgttttgcgctcctttattttagttattatcttttattgaaatcgattacattataacacatattttagtaaataatttacttattttagataaattatttaaaaacactaatttagtctaaatgaaaattcatgatcttgacttgggtcgatttgatattgatcttcaacatctgtaccccagctatcgatgccacctacaccgcgaacggcacctgcgattactaaaactgttctccgggcaagaggcaattcttcaatatgcgttgcattttctagttcttctgctgtgtagggaaggcaactgaagttgaatggcttatcagtttgctcaacggtgaggtcaaaatcctcattagaatgatcagcattgttgagcgtagtatttctagtgattttgagtttatgcgtttgcatgtgcatcccattttcctgtggcactaggtatttggttactggcaatcccttaattttaaaagagccagcactggctccagccatccgatcaggataagtctcaccagataagccttcatattcaaagccactagctagagttggtatgataaagcgcattccaattactggaagcggtggtaaatcttttttaccaaaataacgcatcttaattgtaacatgaccattattgttaatttggtaagtaatttcaacttttgtttttggaatagttaaagtttcataaataaaagtaatttcgactttacttgcgtactcatgattagaaaattggttgttgagcggagcgattggcaaatctgcaaaatcatgttgatcaactttgagctgaatttcagtacagtggctaaacatatcggcgccgagccattgagctgcttttaagttgaaaccgttgccgcgatcgttatcagtagttgcacgccaaaaggttggggtaggaacgcgataaaaccattctttacccttaatttttaaagactctaagccacctttttcatagctgaaaatatattgcttatctggggtattaatgcctaaagtagcatccccatagattatatgtaaattatttgtgtaagccatagtagtatttaacctcctgcattgctggttttggtgtacgatcggcgaacattaagccatcgcctgaaaattcataatcagagtgtcggtcgtcaaagtcgccgccataccgtaatacttcttggccactcaccggatcgtgtactaatagcgcttggtcgatgaagtcccaaataaagccgcctaaatattgtgggtattggtcaagcaatttaatgtaggaacccatgccaccatcagaattacccatatcatgcatatattcgcattctaaaaatggcttttgaggcttatttttaagatattcttcaacatcttttggtggtaaatacatccagctttcaagatcagaaatcttgtcctttaattctggcgtatgaaccacgccttcatagtgggtcaggcgactatgatcgtgtgctttataaaatttattcatagccgcaatgttttctccggcatatgattcattgccaagagaccagaagagaatggcggtatggttttttaaagtttcataattgttgcgggcacggtcaattacagcttcacgccattcaggaatagaaccgggaacattatctgaaggttcaacttgtcccatcttttgccaagtaccatgtgattcgagattattttcagccatgacatagattccattttgatcgcagagatagtaccacggaatctgattaggataatggcaagttctaaccgcattgatgttattttctttaaaagcatgtatatcttgtttcatatcagttaaagtgatgctgcggccacgcttcatattccattcatgccgattgaccccattaataattagacgttgaccatttaataaaacaaccttgtcagaattaatttcgatttttctaaagccgaattggtaaggaattagttcaagtaaatcaccattttcagcgtgaacttcaataattagttggtacaaatatgggtcatggttatcccaaagatgcacatttttgaataattctttttcaatttttatggttaagctgattggtgcttttttctcaagtagagttttgccattaatatcttctacgaacaagtgaactgagccagtatttttgcctgtaaagtgcaattgagcattaaagattccatcttggtaattatttgtaacttctggttttaaatcgagatcggttaaatgcgtctcaggtaggccgagcaattcaactgaacgaaaaatgccagaaaaacggaacatatcctggtcttccaagaaagaggcagtgctatgtttgaaaacttcaactgctaaaatattgtttttgtttttaatgtaaggtgttagatcaaattctgaaggagtgaaactatcttcggcgtaaccaacaaaatgaccattgagccaaacatacattgctcgctcaactccttcaaaaacaatgtgaacatcacgacctcgcaaagtggaatttaagtcaaaatgcttaatgtaagagccaactgtgttatctgcacctttgctaaaagagtcggtagctttttggttgattgtgtaagcaggtcgacgataaatttttccttcccacggaaagagcgtattaatatattgattttgagcgtaattatttagctcaatttcacttgggactggaatgtgatcaaatgatgaagaatcgaaatctgttttaaagaaatcaacgggtcgtgtttgtggattagctgaaaacttaaaacaccagtcaccatttaaactttgaacaaaactactagtttgcttttgccattcgcgatagttcttgaaatagggatgatcgctgtgggcaggaacttgattaacgcggaaaacttcggggtcatcaagccagctaagatttgctttcatgaaaatacctgatttctataaaaaaattaaccttgaaaacgcttatattataacacatagataataaatttacttaataagtaaattatttactgaaaaatattttgaagattaatatttttgactcgaaaacgaatgacaaagtgcttatgatatttattggaattacgtaaatattttgtataataaagttaaaaattatttatttaagatagaaaagatataaatatgacaacaattaaagaaatagcacaagaatcagggtattcttcagctacggtttcgcgcttattaaataatgatcctaatttgtcaattacggctgatactaagaacaagattttagaaattgccaataaattgggctattggaaggatcatcaggaaaagaagatccgtccaacaattgcgttactataccgagtaaatcatgaagagcaactgcaagatgaatattttacttcattaaagcaagcgctgatttcaacagtagaagcagagtcgctgcagatgaagactttttatgatgcagatgatttgattaaacatgcatcactttttcagggctttatcggagttggcgcggcgccaattgaaaatgcaacactaaaaaaactccatgaggttttgcctaatggggtctttgtcgatactaatccagccccggaattatttgattccattcgcccaaatttaacgctgacagtaaaaaatgcaattgatctttttcttgataaaggatatcagcgcattggttttataggtggcattgggcctaagcatgatcatattcaagaagtagatgtacgtgccaccgcttttgcggagtatatcaaggtgagaggcaaaagtgatgaattgatgtttgttaatggcccgtttagcgttgctaatggctataagttgggaaaagaggtactggctaaatgcaaaaataaattgcctgatgcatttttaattgcttcggatactttggcagttggagttttgcaagcttttaatgagaacaatgttaatgtgccaaaagatactgcaattttaagtattaataatagtaatgtggttaagtatgtttcaccgccactttcttcttataatattgatcaacaagagatgattgatatggcattaaatatgctaacgaatctgattattcaacctaatcgggcacacattgatgtaaatatgaatactaatttagttgtgcgcaagagttttgtgcctaagaagtaaattaattagtaaataaaaatattttttagtaatactatcaaaagagaatgctaatttaatgcgttctctttttgtttagctttcagtaaagaatttattaaatataaataaattctttacttaacaaaaatagagaatatactaaactgtgtaaacgattacaattaatgattgctttagggggcaaatttatgacacacagtgacaagtcagggaagcagattctttcctacgcatcattctgtttgggtaacttaggtcactcggctttttatggtgtgatgagtacatattttattatttttattactagcagcatgttcagcggacttaatcagtccgttgcagataagctgatcggcttaattacaggattgatggttgtaattagaattgctgaattggtaattgatcctattctaggaaatatagttgataatactaaaactagatggggcaaattcaaaccttggattttaattggtactttagtaagtgccgccttattattagttttgtttactggcatttttggattagcacaaaaaagttggattctctttgcgattttatttgtactaatttatatcagttttgatgtattttattcattatctgatgtttcttattggggcatggtaccagctttaagtgaagattcacatgcacgtggtatttatacttctttaggtgccttttcaggaacaattggttggaacggattaacaattattgttgttccattagttacagctgtgacttatgcggtaactggtaaacatgaggaaggtgcaccaggttggttagcatttgcggcagtaatttcagctttggcaattgtatgtgccttgattgtttgtttcggtactaaagaaaagcataatattattagaaactcagctaagcaaaagactagcttaggtcaagtgtttggagcaatttttcataatgaccaaattttatggccaagtttagcatacttgctttactcattagcatatgtaattaccaatggtgttttgttctatatgtataaattcgttattggtaagccaaatgacttctgggtagttggtgttattgcaacaattatcggtttctgtattagtccaatgttcccaattctgaacaaatacattccaagaaaatggttattcatcgctggacaaacttgcatggttttagcttatgttttgtttattttcggcagagacaacgtatttttgatggacttgggcttggttcttttaaacattaactttgctcaattggtaactgttttaacattaactgacgcaattgaatatggacaacttaagaatggtcaaagaaatgaagctgttgttttagctgttcggccgatgattgataagtttaccggtgcggtttctaatgctttagttggttatattgcaattgctgctgggatgaccggttctgcaactgctgcagacatgactgctcatgatattagcacctttaatatggtggcattatatatcccacttgctttggcagtcttatcaatcgtagtctttttgactaaggtaactttatctgaaaagaaacatgccgaagtggttgaagaattaaaagatcaacttgcagaaggtaagattgaaaagaatgaatctaatactcaagttagacctcaagatcagactatctatgctcctgcagacggtaagttaatgaagatggcagaagtaattgacgaagatggtaagccattcccaggaaagggttttgcaattaaaccagattcaggcaatatttatgctccatttgatggtgtagttaggttcacttttggtactaagcatgcttttgaaattgtttcaaataatggtttacaagtagttgttcatgtcggcttaggtacagttaacttgcgcggtgaaggttttgaaacttattatgatgatggtcaaaaggtaaaaaaaggtgacttgctgttagagtttgatcgtaatttagctcttaagaatggctatcaggacactgtagttaccttctatacacaaccaggacgaattgtaaaatctagtgaaattgaagctggtaagattgttgagcatggtgaaaaagtattagatgtacaatttaagtagaggaattacaatgacacagttaaaacgttttttatatggtggggactataacccagatcaatggccagaagacacttggtcagaagatattaaagtttttaaaaaagcggatttaaattctgctacaattaatgttttttcttggagtttgcttgagtcaagagaaggccaatatgatttttcaaaattagatagaattattcaagaattgtctgatgcaaattttgatattgtacttgctacttctactgctgcgatgccagcttggatgtttaaaaaataccctgacgtagcgcgagttgattatcaaggacggcggcatgtctttggcgcacgacataacttttgccccaatagtaagaattatcaagttttagctagtaaattagtcgagaaaattgccgaaagatatagtaataaacctcatattgctgtttggcatgtgaataatgaatatggcggcaattgctactgtgaaaattgtcaaaatgcttttcgtacttggctcaagagtaaatatcaaacactagataacctgaatgaggcctggaatatgaatgtgtggagccatactattcatgattgggatcagattgttgttcctaatgagttaggagacgcctggggaccagaaggtagcgaaaccattgttgccggtttatcaattgattatttacgttttcaatctgatagtttacaaaatctttttcagatggaaaaatcaattattaaaaagtatgatactaacactcctgtaactactaatttccatggtttaccaaataagatggttgattatcaaaaatgggctaaagatcaagatattatttcttatgattcttacccaacctacgatgcacctaagtatttaccagcatttttgtatgacttaatgcgtagtttaaagcatcagccatttatgttgatggaatctgcaccgtctcaagtcaattggcaaccatatagcccgctgaaaagaccagggcagatggcagccacggaattgcaagcagttgctcatggtgcagatacggttcagtttttccaattaaaacaagcagtaggcggctcagaaaagttccatagtgccgtaattgcccactcacaaagaaccgacacgagggtctttcatgaactagaagatttgggtaaaaaattaaaaaagattggcccaactgttttaggctctaaaactaaggctagagctgctattgtatttgattgggataacttctggtcatatgagtacgttgacggtattagtcaagattttaattatatggaatcaatcttagattattatcgccaattttatgaacgcaatattccgacagatgtaattagtgtcgatgatgattttagtcaatatgatttagtagttgctcctgttttatatatggttaaagcagggctaagcaaaaaaattaatgcttatgtcaaaaatggtggcaactttgtcactacctatatgtctggaatggttaacaatagtgataatgtctatcttggtggctatcctggcccgttaaaagacgttatgggtatttgggttgaagaaagtgatgcaattgtaccaggacataagacaattgtttcactaaatggcaaggattataaagcgggtttggtttgtgacttgattcatccagaaaatgcaaaagttttagcaaagtactccaatgagttttatgcaggaacggctgcagtcacggaaaataaatatggtcaaggtaaggcctggtatgttggtactaagttggatcacattgggttgacgcagctattcaaccatattgttttgacagctaacgttgaatcattggtgggcgacagtcataagttagaagttactaagcgagttactcagtctgggcaagaattatactttgttttaaatatgagtaatgaagaaagaaaattgccacaaaaatttgtagagtatcaaaatattttaactggtcagcaagctcatgatcaaatgaaggcatgggatgtacaaatacttgttaaataaatgattttttccttaatgaagacaagaagttagacaaacgatctagcttcttgttttttacttaaataaatattttatttatttaagtaaactatttactaaaagatactgaagagatatactaataactgaaaacgattacagaataaatttgaggtaaaaacaatgaataaggaagaattacttaaagaatatgagacaacttttggtgaaaaaggtaaggatgtctttttctcacctggtcgaatcaacgtgatcggtgaacacactgactacaatggtggtcatgttttcccagctgcaattagtttgggtgtttatggtgtttacggcccaagagaggataaaaaagtttgcttgttttctggcaatgttgatggcgatatcgtggaattcgatattgacgacacaactgttgagaaagatgatcgcttttgggctaactacttcaagggcatgattacgtacttacgtgaaaaatatgacaacattgatcatggttttaatctttatatcaaagccaatttaccatcaggttcagggctatcatcaagtgctgccattgaaatgctaatgggcatcattttaaaggatgaatttaacttagatgttgaccggattgctttagccaagatgggtcaaagaacagagaatgaatttgttggcttgaattcagggattatggatcaatttgcctgcattatgggtaaaaaagatagtgctatcttcctcgattgcaatacattagattatgagtataagccactcgctttaggcgattacgaaattattattatggcaactaacaagccacataccttagccgattctgcttataatgatcgtgttcgtgaatgtcatgatgcagtgaagaagttgcaggctaagttagatattaagactttaggtgagcttgataatgatacttttgatgaatatgcatatctgattaataatgaaactgaaattaagcgtgctcgtcatgctgttagtgaaaaccaaagaactttgcgggcaacaaaggccatgcaagatggagatttggaaaaattgggacgtttgattgatgcttcacacgtttcacttcattacgattatgaagtaactggtcaagaactagatactttagctgaagcttcatgggctcaacctggcgtcttgggtgcaagaatgattggcggtggcttcggtggtagtgccattgcaatcgtcaagaaagaccaagctgaggcatttaagaaaaatgttggcaagatttaccgcgacaagatcggttacgatgccagcttctatgatgcggaaattgttgatggaactaagagaatttaatcaaacaagaggataagtatgaaagttattgaaaaatttgcggatgaagttattaatagtggagcgtatgagccgctcgatcgcgtatatgtgattaacaaaattcgcgctttagttggcgatgaggcaagtagcgttgaagctaatgatgaacaaacttcagttaagcaattagttgatttagccgtgcaaaataaaaagatttcggatgatgttacttcacgtgaagttttgaatgatcaactatacgacttgataacgccaacaccatctaaaactaatggcatcttttggcaaaaaatgcaaaaatcacctgaaaaagcaacagattggttttataaactttgcgaaaacaacaattatgtcaaaaaggaagcaattgccaaaaatgttgtattctcagggaccagctctaaaggacatggcttagaaattacaattaatttgtctaaaccggaaaaggatcctaaggcaattgcggcagcagctcatgcaactggtaagaaatatcctcaatgtgcactttgcctagaaaacgagggttaccttggtggatatggcaaaaatgctcgttcaaatttgagaattattcgcatgaatattggtggccgcccttggggatttcagtattcaccatatgcttacttcaatgaacattgtattttcttagatcaaaagcatattccaatggtcatcaaccaacaaactttgattaatttggttgaaattgaaaagacgttaccacattattttgttggttcaaatgctgacttgccaattgttggtgggtcaatgttagcacatgaacactatcaaggcggacgtcatacttttccaatgatgaaagctaagattaagaaaaatgtagtctttgatgattatcctgaagtggttgctggcattgtcgattggccaatgagcgacttgcgcttgattagcgataattcgttagatttgattgaattgggcgctaaaattattaatttctgggatcattattcagattctgctcgtcaaattaaggcttttgatggtaaaacacgtcatcatactgtgactccaattatgcaccgtgaaggcaagaacttcgtacttgatctagttttgcgtgacaacaacactagtgaaaattatccgttaggtattttccacccacataaagaattgtggcatattaaaaaggaaaatattggcttgatcgaagtaatgggccgtgctattttgccaggtcggttaaagagtgaacttgaagaagttaaaaaatactggttgggccaagataataagatggctattagccacaaagaatgggccgatcaaattaaagcagagcagaatattactgccgagaatgttgacgctgtgatgcagcaagctttagttgaagtctttgaacaagtattgcaagatgccggtgttttcaagaataatgcagatggcgatgaaggctgggataagttcattaccgctttaactaggcagatttaactcatcaatgtgtaaaacgagatctgttggatctcgtttttttgttagcggtaactcatatattctgatggttaaataatttataatatttatgaaagcgaatacaaaagagaaactgtcaaatcttttgtgtaaatagatctttctcgtaaattgattttttaattatttatttaatcaaagtaggattctaaggtgtcctgaacctgaccaaagcctttatgaattcgattgaaataacggtcattgtagctcattgcctgaatgccaataaaagcatcaagcgactgttcagttggaaactctgccttaggcttagctttgcgcttgatcacattgttaaatgattcaatcatgttagtcgaataaattgaagctctgatctgcttgggatagttataaaagaccagcagatctggttctatgtctttcaagcttctgataacatggctgtaaaccttgccccatttggtatagaagtcatgcaggacagctgtggcttcttctttgtttgtctgttgatgcacctgtttgaattcgttcatgatcttttcacgatcgtcgacgcgtactttagcgcagatattgcgcatgacatgaaccaaacagcgttgaaaatgagctttaggataagtcctggccaaggctgttttcatgccaacaacaccatcagaaagaaaaagctcaacttgctttaagcctcgggatttcatgttttgaagcatatctgtccagacttcaatgttctcgctaggtgcaatgcagtagtcaatgacctccttgtgcccattaggcttgatgccaatggcaatatagactgcttcacgctcaaatgtttctcggcgcaaaggaaggtatgtcgcatccaaatagacgcagaaaaacttgtcgcttagcttgcgtttgtggtaagcctcaacctttggaatcatctgcttggaaatatttgatacctgagctggactgtaatggctgccatacatcttttcaattagatcggctatttccctggtggtcacgcccttggagtaaagcttgataatcatgctttccaagatatccgagtgctgcttgtagtcaggcagcgtgtgctgatgaaattgaccgttgcgatcccgaggcacttgcacttcaattgggccaaattgcgtatcaactttgcggaaataagcaccatttctagagttgccagtattccagccatttctggcatagggatcatagcccagaaaggcagtcaattcagcttctaacaagttattaacagcctgttgtagctctttgcgcaataaatcatttattttgtctggattgaatagagcttgagcaaaatctttggtaaaatcattcatgaaggagttcttctttctgtatgtgtttttttgttcaaaccaatcatacgagaaaggaactcctttttctaatgtttaaagaaataaatttaaggaatcattcatccttacacaaactattttacagtctcacaaaagaagggcaagagtatgaagacaagttttagaaaatatggcagaaaagataataaagatctttgtgaaatcacactagagaatgatcacggtatggtagttaaggtattgaactatggtgctacattggaaaaggtgttgcttgatggtgagaatatgattttgtcactggataagccagaagattacgacaaggagcgtaattatctaggcggtacggttggacgtattgccggaagagtgagacgaggtttatggcggcacggcttagaattacatcaattaccaatcaatgaagggcctaaccacattcatggtggtattgggactgatactgaaatttgggattttagacctagttgtaatgaaaaaggtgctcgtgttgatttaacactttttgatccagatgggcataatgattatcctggtaatttaaaattacacgctcgttatgagttagataataacaatattctgcattattcattgggtgccatgagtgataagctgactatttttaatccggttaaccatactttcttcactttaggtgaaaagaaaatgattaatgacttgcaactgcaaatgaatgctgattattatattccagttgatgagactggcttgcctgatcgtggtatggaaaaagttgatggaacagcattcgattttagaaagaagaagcgagttggggatgcattggaagctgatgatccgcaaattaagaaccgcgatggaatggatcatccatttatcctggatggcaatatgccaaatgcagtgctaacttctgctaaacacaagttaacggtaacgactaatgctccatccttgattctttatacaggaaatggatttgatcatactggtaaatatacggctgattttggtccatattgtgggattacgtttgaagctcaagtgccgccagcagaaggtgatgatttgggacgcatcacgcttttgccaggtgaaaaatttaagcggactgttgattggaaatttgaataaaaatatggagaacatccttactgaatgaagtggtagggatgtttccttcttttggatattatgatttgattttacaagtaaatctatattaatatttaaaatatttagaaatcaactgaaaggtatagtaaaaatgatgacaaacgaaaagattattgctttagtcaaggaagaatatctaaacaagattccaaaaatttttcgcaagcatgctgttgaaggcacttgcaagttaatcgctagagaacatcccgatttatacaaggcttttgaagatggtgaaccaaccgcagaagaaaaacaacaaatgacagagttgattaacgggattttcgaacaaagaatgaaaaagcataagatgttataaaaagacgctggaatgtaatgattattagatcgctacattctagcgtttttttgattttaattttgatttattaaactaacaggtagcgtataaacactttctaatgaaacagagggatcattaatttgacgtaaaagtaaatcgcacattaattcagcaatttcttttgtatgttgccgagcgctaattaaatttggaaaaagactttgaatcaaatgactaccatcaaatcctgtgattaaaggtacttttcctaaataatcagcacattctttagctagtaaagctgtaatgtcatcggtacaacaaattgcatcatattcgtcatcctttaaaaattgaaggatggctatttttttagcaataattgagtcactggcactgagtgagcgaagatcgaatttagaatcaaaagtgttaaatacgcgaatcattcctttgattcgatcacttattgggtaatagtcttctttagcaccagcaataataataattttctttttcttttgttttagaacagattgtgcgatttgcatacctgcgtcatagttattagattgaacagttggtatttgaggactaattttacggtcaaagctaacaataggaaactttatttttagtccttttttaggaatcttaataggagagctggtgatcagtccagcgatttccttttgtttaaatcgctctaaatagtaattaatatcttgggattgatagtgatctagatgaagaatacaatcgtatcctttttcctgtaaataaaaggctagatattcaaataattcagaataaaaaggattattaatttttggaaaatcaacctcgattaaatttaatttagatacagagttgacggtaccttttactttatatcctaatttttttattgcttctttaaccttaagagcagattcaatacctacatatccattttgattaatatatcttgaaactgttgctatcgaaacgtttgcttctttagctatatctttaatagtaactaccatattttttcacttccttatgtaaatattacacatttaaaatcctatatcatagtattttgacttatttaaatgtgtaaatttgtgtaaatccattgaaaactgtaaatagaagtgtatgatgtaattgtaaatatgatagcgcttacttaaatagagcgatatttgatcaagaggagtgaaaatttatgaaaaagtggctaaaaagaatagctttaattagcttagtcgctacgatggctttaagtttgacagcttgtggtcaaaataaaagcagcaattctggtaaaaaagtgacaattgagtactttaaccagaaaaaagaaatgtcagcaactttgaaagaaattatcaaagactttgaaaagaaaaatcctgatattcatgttaaagaagttgacgttcctaatgcaggtacggttttgaagacaagaatgctttcaggagatgttcctgatgtaattaatatttacccacaaaatattgattttcaggaatgggcaaaagcaggttattttgaagatatgactcatgcttcatatattaaaaacattaaaaatcactatgctgattcttttaaaattaacggtaagatttacaacgcactacttagtgccaacgtttacggtttcttctataatgcaactgaatttaagagattaggaattaaagctcctaagacttgggccaaatttgaacaaattgttaaaaaaatcaaggctagtggcaaggcaccatttgctgtagctggtactgaaccttggactttaaacggatatcaccaattatctttagctactgttacaggtggtgctaagcaagctaaccaattacttaggttctcagcgcctaacggcattaaagtaaacaatccttatattcaaaaagattttactagattgaacttacttcgtgaaaatgcacaacaaaattggcgtggtgctagttacaacgatgctgttgtttcatttgctaatggtaaaagcttgattatgccaaacggttcatgggcattacctatgatcaatcaacaaaagccaaaatttaaggttagaacatttgcttttccagcagcaaaggctggtcatgaaatgacagttggttcaggcgacttagctttgtctatttcatcaaagagtaagcacaaaaaggcagcagaaaagtttgtagcatatatgacaacacctgctgcaatgcaaaagtactataacgttgatggaagtcctgtagccgttaaaggtgtaaagcaaaggggaattaattctcaattgggaggcttgtctactttggctttcactaaacacgatatggtttggttagcacaagactggactagtgagaatgatttcttcaatttgacggctagttacctgatgactggtaataagcaacaaatggtaaatgatatgaacaccttcttcaatccaatgaaggcttctaactaggaggattaaaaaatgaaatcaaaaagttttattgaaaaacattggggttggttgtttttaatcgttccattgattttacaagcaattttcttctattttccactatttcaaggtgctttttacagttttactaattggactggtttgacttataactacaagtttgtaggaattaataactataaattattgttgatggatcaaaactttgctaaatccattggttttactgcaattctaactatttcattgattattggtgaaattgtaataggtattttagtagctagagcattaaactcaaagatcaagggtcaaacattctttagagcctggttcttcttcccagctgtattgtcaggtttgacagttgctttgatttttaagcaagtattcaattatggtttgccagcaattggtaatgcacttcatattgaatggcttcaaacaagtttattaggtactaatactggtgcggtaattgcaactattttcgttttgctttggcaaggtgtggcaatgccaatcattatctttttagcgggtttacaaagtattcccgatgaaattaaagaagctgcggagatggacggtgctaatagtcgtcaaatcttctggaacattgaattgccatacatgttaccaagtatttcaatggtctttattttggcattaaagtcaggtttgacagccttcgatcaaatctttgcaatgactgcgggtggtcctaacaactcaactacttcacttggtttgctggtttataactatgcgtttaacaataactcatttggttacgccaatgcgattgccattgtcttgttcatcttaattgctattgtttcattcattcaaattaagatttctaacaagtatgccgttgattaaagaggagtatcaaaatggaaaaagaaaataaatcaaagaagttttgggattatgctttactgattgtcggtggaattctgattttaattccattgctctatacatttttaagttcatttaagacaactaagcaaattatgaatcatttctttgcttggccaaatccatggacatcagttaactttcaaagattgtttgcggatggagtaatgggttacttctggaactcaattgtcattacggttttatcaattgtcttagtaatgattttcgtcccaatggctgcttactctattgctagaaatatgtcaaaacatacagcctttaattggatgtatatcttgctaatcattggtatcttcgtaccattccaagtaattatgattccaattactgtcatgatgagtaaaattggcttagctaatatgtggggcttgattattctgtatttaacttatgcagttccacaaacattgttcctttatgtaagctatatcaaacagagtgttcctgaaagtttggatgaagcagcagaaattgacggtgctaataagattaccgcatatttcaagattatcttcccattattaaaaccaatgcatgcaacaacattaatcattaatgcaatgtggttctggaatgactttatgcttccactgttaatcttgaacaaagattcaaagatgtggacattgccattgttccaatacaactatacaggccagtatttcaacgattacggtccaagttttgcttcatatgtagtaggtatcatcacaattacaattgtttacttaattttccaaaagaatattattgccggtatgagtaacggtgctgtgaagtagttaagaatagagacgaggttttaacaatggttaaggtagatttagatcacgtatataaaaagtatgatggtaatgataagtattcagtaacggactttaatttacatattaaagacgatgaatttatcgtttttgttgggccatctgggtgtggtaaatcaactactttaagaatgattgctggactagaggatatttcaaagggtactttgaaaattggtggtaaagttatgaacgatgttgctccaaagaaccgtgacattgcaatggtattccagaactatgctttgtatcctcacatgtctgtttatgacaacatggcctttggtttgaagttgcgtaagtatagcaaggaagatattgataagcgagtacaacgtgctgcaaagatcttgggcttgacagattacttaaagcgtaagccatcagcactttctggtggtcaacgtcagcgtgttgctttgggacgtgcgattgtgcgggatgctccaatctttttaatggacgaacctttgtcaaacttggatgctaagcttcgtgtaacaatgcgtgccgagattgctaaactacaccaacaattgaagacaactactatttatgtaactcacgatcaaactgaagctatgaccttagctgatagaattgtcattattaaggatggtaagcaacaacaagttggtagtccacttgaagtatataacaaaccagctaatgtctttgttgctggttttatcggttcgcctgctatgaacttcttccatgtaattttaaaggatggcaagatcattgataaagataatcatgacttcgaaattccagttccagaaggtaagttaaaggcattaaaagaaaaaggatatgacggaaaagagttgatctttggtatacgtccagaagatgttcatactgagcaagtatttttagaaacctatccagacaatgttgttgaagctaaagtggtagtttcagaattgttaggtgctgaaactcagctttatactaaagttggtaatactgaattggtatcgaaggtagaccaaagagactatgctaagcctggcaatatggtaaagatgggctttgaaatgaataaggcgcacttctttgatcctgaaactgaagtagcagttgagaactgaggttaagtaatgactaaaaacttaattacatttgatgaaaaaaataaagtttttcatttgcataatgaccaaatttcatatctgatttcaattgaagatggtggcacactaagtcacttgtatttcggtaaaagtatcaaagcatatcatggtgaattgcggtacccacgacttgatcgaggcttttcaggtaatttacccggatcattagatcgtactttttcaaaagattctttgccacaagaatacagtagtgcaggcgaaatggactttagaacgccagcaatgattgtgcgccaaccagacggttctaatgcagtatttttaacctatgaaaattatcaaattgtgccaggaaagcctgaactaaaaggtttgcctcatgcatgggtaaagaataaggatgaagctgaaactttaatcattactttaaaagataagtttagtgagctgagatttgacttgctttatacaatttatcgtgatcgttcggtaattgtgcgttcgactaaagttagaaatgctggcaaggaaacggtaaaaattgaaaaagtagcttcgatgcaaatggatttcgtagatcgtgactttgacatgattacactgccaggtgcccatgcgcatgaaagacgggttgaacgaaacaaggttaatcaaggaattcatgtttattccagtattcgtgggacatcaagccatcagatgaatccatttgtagcgttggctgatccagatacaaatgagtttgatggggatgcatatggtttcgcctttgtttactctggcaatcacaagtttgaagtagaaaaagatccgtatgcgcaaaccaggattgttgttggcattaatgattacaactttagctggatgctaaatgcgcaagagagtttccaaacacctgaagtattaatggtttattccgatcaaggtttgaataagatgagccaagctttccatagtatcattcatgatcgcattatgcgaagcaaatacaaagatcaggttcggccaattgtggtgaataactgggaagcaacttacttcgattttgatgaagataagttaaagccaattgttgataaggctaaggaattaggcattgagatgtttgtgcttgatgatggttggtttggccatcgcgatgatgataattcttccttgggcgattggcaggtctttgagaaaaaattccctcatggcctagatcactttgccaattacgttcatcagcaagggcttaagtttggtttgtggtttgaaccagagatgatctcaattgattctaatttgtatcaaaagcatcccgattatttgatgcatgttcctggaagaacaccaagtccagctcgtaaccaatacttgcttgatttaggccgagcagaagtacgtaataatatttttgaccaaatgaaagcaattcttgactcaggcaagattgactacattaagtgggatatgaatcgccacttgtctgatatttaccaagctgatttgccagcagatcgacaaggcgaagtctatcaccgttatgtattaggtctatatgatttacttgaaaaaattgttgatcgttatcctgacctcttaattgaaggctgctcaggtggtggtgggcgttttgatgcaggcatggcctattacaacccacaaatctgggctagtgatgatagtgatgcaattgatcgcttaagcattcaatatggcactagtttagtctatccacaatcaatgatgacttcgcacgtttcggttagtcctaatgagcaaaatggccggattacgccgtttaagacgcgtggtattgtcgcaatgtggggggatttaggttacgagcttgatttaactaaattaagcgaatcagatcaaaaggctgttgctgagcaagtagctgaatataagaaaattagagcagttactcaatatggtactttttatcgcttgaaaaatgcgcaagaaggcaaccaatgtgcatgggaaactgtttctcctgataaaaacgaagtagttttatcaacagttaaggtcatggccagtgcacagccatactttactaaaacaaaattagttggtcttgacccgaataagcagtatgaagatcaggcaagccaccaagtatatggcggtgatgaattgatgaacctaggaatttatgatccggttgaacatggcgatttcatggcttatcggtatcactttaaagcaattaactgaggaaatttgtgatggcaattaagaacaaagtaatgttgattacttatcctgatagtttaggtaagaatctaaaagaattaaacgaagttttacataaagacttaaaaggcgcagttggtggcatccacttattgccattttttccatcaactggtgatcgtggctttgcgccaactgactacactactgtagatcctaagtttggcgattgggctgatgtcgaaaaattaggtgaagaatattacctgatgtttgactttatgattaatcatatttctcgtcattctaagtattatcaagattttcaaaaaaataaggatcaaagcccttatgctgatttattcctaagctgggacaagttttggcctgaaggccgtcctactcaagctgatgttgatttaatttataagcgtaaggaccgtgcgccttatcaggaaataacctttgccgatggtaccaaagagaagttatggaacacttttggacctgaacaaattgatttggatgttcgtcaaaaagtaactcaaaagtttatcaaagatactttaactagtttagtccaacatggcgcagacattattcgcttagatgcctttgcttatgcggttaagaagctagatacaaacgacttctttgtcgagccagaaatttgggatctacttaaagaggtgcaagctgatttggctggcgagggtgcaaccattttaccggaaattcatgagcattattcaatgccattcaagattgctaagcatggctactttatctatgattttgccttgccaatggtaactttgtattcactgtattctggcaagagcaatagtcttgccgcctggcttaagaaatgcccgatgaagcagtttactacgttggatacgcatgatgggattggtgtagttgatgctcgtgatattctctcccctgaagaaatcgactataccagtcaagagttatatgaagtcggcgctaatgtgaaaaagaagtattcaagtgctgagtatcataaccttgatatctatcaaattaatactactttttattctgctttaggcgatgatgatcagaaatacttcatggcgcggttattgcaagtctttgcgccagggatcccgcaagtttattatgtagggatgctggctggcaagaatgaccttgaattactggaaaaaactaaagaaggtcgcaacatcaaccggcattattacagccgtaaagaagtggctgaggaagttaagcgtccggtcgttagttcgctcttaaaattatttacgtttagaaacaatgaacctgcctttgatcttgatggttcaattgaagtctccactcctaatgaaaatgaaatccaaattattcgtaaaaataaagagcaaaccagccaagccgaattaaaagctaatttaaaagatttaacttataaagttgtagttaacggtcaagaagttaaattttgatcttttccccctctagatgaaaaattaaacaatattaatataaataagcaaccttgctcaattttagtaatggttgcttattttagtttcttgtgacttatcacaaaatatattagctttattcaaataaaaatcaaataatcttgttatgattaaaaagggaagaagggataaacgttgaatatttatgggaaatacgccccaactttagataaattacttgatcaaatgatgacgcaatttgagcagttaaataaaaattatgaaaaaggacatggagaacgtctctatgaacatttacgtggtcgggtaaaaagtgaagccagtatggaaggcaagtgcaaaagaaaagatttaccgttaacgccacaatcagctttgcgtgctaatcgagatagtgttggattgcgtgttgtctgcaattttattgacgatatttatacctgtattgactttattaagcagtgggataatgttaatgtttatcaggaaaaagattatattactaatgctaaaactaatgggtatcgttcatatcatatgatttttgacgtgactgtacctgatgaagatgttgacggcaatataccgggtcattattttgttgaagtgcaattaagaacaattgcgatggatacttgggctagcctggaacatgacatgaaatataaacaccagattaagaatcctgagatgattggcaatgaattaaagcgagtagcagatgaattagcttcttgtgatgtgtcgatgcaaacgattcggcagttaattagggaagaggattaatgagttaatgaagattttagtagcagaagatgaaccgcaactattgcgggttttaacagtggccatggaacacgcgggttatgatgtggatccggtagataatggcttaaaggcagtcgagcatgctaaagaaaattcttatgacgtaattatgctggatatcatgatgtcagtcatggatggaattacggctttgaaaaaattcgtgaaagtggcgataagacttatattttaatgttgacagctaaggccgaggttgatgaccgagtaactggtcttgatagtggtgctgatgattatctgactaagccattttcacttaaggaattgttagcgcggctgcgttcaaaagagcgccgtgaagatgactttactcctaataagttggaattaggggatgtaactttgaatgtgactaagcaggagttggctagtcataattcaattcgtttgagcgggactgaaactcaattgatgaattactttttgttaaatcaaaataaggaattatcaacagaagagttgcttaatcatgtttggaaaaatgatcttgatgccaatagcgaggtagtctggatctatgtttcatacttgcggcaaaaattgcaatcaattcaaagctcagttcgaattgaaggcgataaaggtggttcatataagctagttaagtaggtgagcagatgattcaaaaatttcggtggaagtttattggtacttctgttgctgccttgtttgtagttttgttgttgacgttaggcggcttagtttgggtgactcatgttcaaagccaaaatgaagtcgatcgcgtgctaacggctttggtcaaaaatgaagggcgtttgtcaccaaaaaatgccaaaccagcctttggcgatcaacatgatccaattaatcgcaattttttaggtgggcagtataatcccgaagcggtttatcagtatcgctattttgcggtaacaattgatgaaagccatcaggtacatgtaattaatgataataacgtttataaaattaataattccaagatacagactattaccagatcagctttagaaaatggtgataaaagtggtgtagttgccttaggacaaaatcaatatgcctttagggttgtaaaaaattctactggtgaaatgatgattgtttttttgaatgaaactctgatttttaaccgtttttggttattatttagagtagcgttagttttaggcttaggcgctttgattgtctttgctttagttttgattttagtttcgggcaaggcaattaagccaacgattgatgcttatcacaagcagcaggaatttattaccaatgccggtcatgaattaaaaacgccactagcagttatttccgcgaatacggaaatggaagaaatgctgggcaataattctgaatggaatgaaagcaataaagagcaggtggctaaactaactaagttaatcaatcggttgatttcgctggctcgagctggcgagacgggtgagcttaccttaagcaaagttagcttttcagaaatcgttgaagaaacgactaaagattttaaatcagtcatgaagaagaatgacttagtctaccaagtatcggtgcgggaaggcttaaatgttttagctgaaaagcatactttagccgaagtagttaatattttgctagataatgcgcaaaaatattgtgatcctcatggcaagattcaggtgaaactgactaagggcggaactttaagcaaatatgcggtcttgcgggtagaaaatacctatcgtgaaggtaaaggcaaagattacagccatttctttgatcgtttttatcgcgatgatgagtcgcataattctaagaaaggtggctttgggattggcctggctatggcgcaagagttagtcgaagcctttcatggcaaaattttagcccaccacaaaggtgaagacattgtttttactgttagtttaaaaattgctaaatgatcattctgtgatagttgtataattagagcagaattgggggatcattttggcgaagagaaaatcaatttataccaaagatgttgtcctagttatggcagcatctttcttttttatgtttagtacaatgtttgttaatcctttgatcaatggctatgccaaagaattaggcgctagcagtgcttttgcgggaatcattgttgggattatgagcttagccgccatgtttttgcggccggtagccggtaatttgactgataaattttctaaataccgcttatcatttattggcggcgttttgatttttatcggagtcatggggtatgttttgactctatcaagtggctggcttttgctttttcggctgattaacggtactggttatgtcctttgcacagtttgtatgactacttggctagcctttttagtgccgcgccaacacgttggtgaagcaatgggcttttatggcttaatgaatgctttggcaatggcgttagcaccagcagtttcaattaatatttatcaaaaaataggttatcgcacaagcttgctagcatcagctgtttctgctttattaatgattgtggccattcagtttgtgggtgatcatgctttgcctaaaaagcgagttcgaacgcagaagaagagtttcaaaattatccagtttaatgttttaccggtagcaattttgacaactttatttgctatcccgtattttgtaacacaggcagatattgtaacttatgtagaacaaaaacatctgactgtcgcagttgggtcatatttcttgatctatgcggttgttttgttgattattagagtaggactaaaaaggtattttgatacagtacgttttggcgtctggttttggctaagtctagtttcaacggctgcttatattatcttgctcgcaataatgaataatgattggcaaatggctttagcggcagctttaatggcatcaggctatgggatcatttattcagttttgcaatcaactgcgctgttgttagcaccgattgaagaacaaggcttagctagtgctaccttttatttgggactagacattgcgatggcctttggcccaatgatcagtggtgtaattgattctgctttaccgatagaatggttctatccagtagaattagtcttagttccattgattttagtagtttatttcatttggcgtaagcgtttgaatggcgcaattgaccatcattagagggaaaatatgagcgaatatgtagttaaatctaagttagaagataaagaatggcaaattgccaaccaagtacgtgatcatgtttttgtttgtgatgatgttaaacatgatgcaggtcccaacccagttgagtatctatgtagtagtgttaattcatgtattgtaatgtcggcagggatgattactaaagcacatcaacttgatgttaaaaattttagggtagaaaaccaggcaaaaacggagaatctcggtcatggtaaatcagtagtaactgagatgaagatcaaggtcttctttgattcggcaatgactagagccgagaaggaagaatttttagctcatactttgcatgtttcaactgtttatcaaactattaaagcagctgtcaaaatttatgtggaattaggaaaataagcgatgagcgagccatattacaaacaagaataccagggtgaaagaaagttagatggtgaggccccagtttttagttttgatcaaattatgaaagaaacttttctgcgaccatttatctggaatgcaagaactaccagaagaagtttctggattggaatcgttattactgaagttataatttggattggtggaattattacatttttggcaactgttatgccagtttctcactatgagaatgattcagctgatatgataaatggttttgcttttaatggtgatcacgcttcgatgattgtcattatcggtatgattatttggggcttgatctatctttatttgaaattatgccaattaggcctagccgtaagaagattgcatgatatcaattatacaggttggtggattctgttaatgctgataccgttaggttggatttttgttctgtattttgcaattcagccaagtaaacaagagccggtgaaatggggaacgtatctttaccttgacgaataataaaaaatgttataatttaactataagagattacgttaggagattatatcgatgaaaactaagaatttatttacttcattagctgccgcagtgatgctttcagctggtttagctggtgcaggtgtgtctgctgcagaaccagttcatgcagcaactacacaaacttcaagcaaaaaaggtaccattagtattaagcgtagatcagtatcagctacagttaataatgctaatcctaagctttacgctgtaaaccaagatggtaaaatcgtaaagtcaatggattcaaattatactaaaggtcaaaccatccagctttacttttctaacgaggctaagaacgatcaaggttctgttactttctattatgttgacagtcaaactgtagatggacaacaatgtgcaatttatgttgtttcgactgatgttaccccttcagcaacagttccaagtcaagcagactggtcaaagcaagcacaaagtgacaaaaaagccattcaagatgcttacaacaatagagcattaaagtacatcgttgtttcacctaagtcaaaaaagggtgcaaagatctactacgcatataagaagagtgctaaggctaaaaaggtttactttaaggcaaccaagaagaagatcaagtacggtaagaagtacaagtcatcgatgatcgttaaaaacggtaagagcagatatgcttatattggtaagaagagatacttaaagacctctactattaaagtagtaagtgttaagtacgcaccagttcaattatcagatgatttgaagaacttaattgttcaaaactagaaaaagttaataaaaattgtagcgtaaaggatgaattattgtcctttacgcttttttgatctaaaaattaataataataatattgataaaaaaactcactgacctacaatagactttgcgttatttttagggagttgtaaaaataagaatgaagagagtaaaagtctatttaggattagcttgtttgatgacgttattatgtttgaagccgcaaatggtttgggcgcgagaactaaatccatttcagactaagatgattaatccgcatacgtcttatagaatttatcaaaacttaactcgtaaaggtccgtcaagaagtctatgccttgctaatacgtttaaacatggcaatgttcaagccagtgcagttagaaaagttcgcggcaataagtattgctatgtttggttagacggacatagaggcggttgggtcaatcagcgagcttttttaagaagaaaaattgcagttgtacatcagattagtttagtgaagaattcgcattatagttttccaactagggatgcgattaattatgcaacagatgcagcaggaacgataattgagccaagtaaagttaaagtatctcgagcagaagtttcatcaagtaaaaaggaaagctatcgggtaagttattcttatggtaaagctcatgctcagacagttgttcaagtgagagctaatgctagagagggcattgttaaagcaaccaaaaaaccacaagctggagacagtgctcgtagctggttcaagcactataagacgtctggtaattggggcagaagttttgcgccggaaactaaatcgcatgttttaaaaagtgttcattttaaactgaaaacctatttctatcaacctgcgactttatgtcaaagtgattcggtaactgggacggtgggactagtaccagaaggattgaccgtgtcaaatggttcaatgtatgccacaatgtatcattcacctaatgatacgcgtgctcacattgtttcttacaaatttaatcaagtgcctaatcgctatactatgcaaaagttgccatggctaccttggtcacaatttctgcggcttgcatcccatgttaagataagcccatatattaaattgggacatggacaagcaatcggttcaactcgaaagtatatttatgtgattgctaataaccatttattgcgcaagagctctcaatcagaagaaattatgcagattagtaaaaacaatttgcaaattaaacagatttggacttttaaagtttggaatcattcagctagaacaggtcgttatttccataatgctacttttgtaaatgatcaccaatttattgccgtttaccatgatgccacagaccaccgttttgaatattgggaagttactcgtcagggtaatagttggtatcctaaagagattggcgctactagaggagattttatgcgcaatgattctcccgttcaaggaattacctatgacaagcataaaaaacagatttatttggcctttaatgattatttgtttaaattgaaacgctcaggtaaagtgctggctagaggtcactttcatacagggcgtgaatttgaggggattagcataaatggtcgtcatttatacgcagagctggcgcaaaggccagaattgttgaggcagaggataagataataggtgtaaaaatatgttatacccagataaattctatttaacacaagatttaaatagaagatttgccagaactaaccttgctcgactaatatttagtgatttgcattttgagaaaacaaatatttctttaattcaaacacaattagttgctgatgggttaaatatagagagggcttccgagaaagataaggaaagaattattcgattaaaacgagcatggcaatatattattaatgaaaataaggtgttatctttagatattgaactaaagatacatttattactgacaggctatggcttccgagataatctaaactacaaacaagaagaaaaatttttcgatgagttaatgaacaacgatacctcgactacagataaggcaatgacattgatgtatcataatatgcgtaatcaattattctggggcggaaataagcgtactgccacactagctgcaaataaattaatgattgaccatggagcaggtttaattaatgccccacttgataagtgggatagatggaacaagctgattagtcaatattatttaaccggcaaaatgaatatgttaaaagattggacctatgaaaatggcattcaaggagtagtgctgaataataattcagatttacctaaacctgatattaatccagaagattatgattaattacttaagcagaccgaataggcctgctttttttgtgtgcaaaagctctttttgaaaatatcatgataaaagttcataatagaaattgtttgtttatgttaaaggagttgttttattttttatgaagaataatgatcacgttaagataagtcctagtagtcttgtcttgatgattttttcttctatttttggatttagtaattcactgacagctttttatcaaatgggttattcaagtatcatttggtatattgtcacagctattttattcttcctgccatcagccttaattttcgctgaatatggtgcttcctttaaaggaattaaaggtggaatcttttcatggcttgaaggatctactaatgaaaaagtatcatttatcggaacttttatttggctggcagcttgggtaatttggttagtttcatcaacccaatttttcttagtttcagtttcaacggcaatttttggtcatgatactaccccaagctggcatttagggtcgctgacttcaactcagttattaggtgtgttggaagttattttcttagtaattgttacattttgtgccgcaaagggaattgataaaataaaggcgattaataatattggtgggatctttactttaggaattgccattggttttacagcagtttcactttttgtctttattttgaatcatgggcaattagctgaaccagtgaccgcacaaaatatggttcattcacctaatccagcatttcagtcaccgattgcggttatttcatttattgtctatgctttatttgcctatggtggtctggaaacaacctcaggagtaattgattcagttgataaaccggaaaagaattatcctaaggctctgattacggccatggtcttaatgacagcactttatgttgtaaacatctttatgtgtggggtggctgttaattggaacaaatcgttaggtggtaaaggtgttgacttagctaatgtcgaatatgttttgattaataatttaggtattgtcactggtcatagcctaggtctatcacattctacttcactggcaattggaactgtcttttctcgtttggccggaattgcggatgtgttatcaggaattgccgctgcctttttgatggtttattcaccgattaaatcatttattgaggggtgtgatccgcgactattgcctaagaaaatggttaagttaaataagcacaatatgcctgaattctcgatgtgggtacaagcaattgtggttagcgttattatcttatttatttcatttggtggtaatggagcacaacaattctatacaattttaatggatatgatgaatgtttcttcatcagcaccatatttatttttaattgctgcttacccattttttaaagctaaaaaagacttagatcggccatttgtttttattgaaggtaagaaaaaagtttgggcaacgacaattgttgtttggttagtggttgcggtcggaattatctttacttgtatagaaccactctttaccggagactggcaaacttcattctggacggctattggtccagtggcctttggtgttattgcttggatttattacgcatataatgaacgaaaagaaaaagcaatggcttaatacgcaaaataagacgaaggattttgtccttcgtcttatttcttttctctattttttactttaagccagctactctgacaacatcacgttcaatcattaattcctcattagttggaataaccataccaacaatagttgagtcgggcttggtaataatggtggcattttctttattagcggctgaatcaggcttaaggcctaaaagttcgagtgaatccatgacatgttcacggacaccaaagtcgtgttcaccgacaccagctgtaaaggcgataccatctaggccacgcatttcaagggtataagcaccaacatagcgaatgattcgattaatgaaaatgtttctagctaagtcagcacgcttcttcttttccccttcgagcttagtcatgtcaccacgtaaatcacgcatatctggtgaaatgcctgaaattcctaacaaaccagattcgttgtttagaaccttaagcatttgatcagcatcaagattttcctttttcatgacaaaagcaagtaaagaaggatcaacatcacctgaacgggaactcatcgtaatacccgccattggtgaaaagcccattgaagtatcgaatgatttaccatctttcacagcggtaactgaagcaccagatcctaagtgacaaacgattaatttcaagtcctttaagtcgcgtttcataatttcagcggctttttgactaacatatctaaccgaagtgccatgtgcgccatattttcttgcaccgtatttttcatagtatttatatggaagtgagtacaagtagtgcactggatccaaggtttggtggaatgaagtatcaaagacagcgacttcagggacgccaggcaatactttcatgaaggcattaatgacatcggcttcagcggtattatgaagcggcgcatattgtttcaaatcataaatcttttgtagtgacttttcatcaattaaggtggagtccttaaattcttcaccacccgcaacaattcgatgtccgattccgatgatttctttaggatcgtcaattaaatcatacttttttaaattttcaagcaagattgtaacggcagtttcggaatcaggaatgtcaactttttcttggtgtttttcacctttaaccttgattgtaaaggtggagccgttaagcccaactcgatcagccatcccttcgctgataactttttcatcaggaaaggtgaaaagcttaaatttaaaagaagagctacccgaattaatcgctaaaatttttttcataaattatgcctctttttcttaatttttgcagtgcaacctatccagtaagggcatgcaataaagaaaatgccactaatctgctttaagtaagttcttgcagtaatagtgtcaacgtctttattatacaacttttgctgtaagctcttacagatatgaaactgtcaaatcttttgtgtaaatagatctttctcgtaaattgattttttaattatttatttaatcaaagtaggattctaaggtgtcctgaacctgaccaaagcctttatgaattcgattgaaataacggtcattgtagctcattgcctgaatgccaataaaagcatcaagcgactgttcagttggaaactctgccttaggcttagctttgcgcttgatcacattgttaaatgattcaatcatgttagtcgaataaattgaagctctgatctgcttgggatagttataaaagaccagcagatctggttctatgtctttcaagcttctgataacatggctgtaaaccttgccccatttggtatagaagtcatgcaggacagctgtggcttcttctttgtttgtctgttgatgcacctgtttgaattcgttcatgatcttttcacgatcgtcgacgcgtactttagcgcagatattgcgcatgacatgaaccaaacagcgttgaaaatgagctttaggataagtcctggccaaggctgttttcatgccaacaacaccatcagaaagaaaaagctcaacttgctttaagcctcgggatttcatgttttgaagcatatctgtccagacttcaatgttctcgctaggcgcaatgcagtagtcaatgacctccttgtgcccattaggcttgatgccaatggcaatatagactgcttcacgctcaaatgtttctcggcgcaaaggaaggtatgtcgcatccaaatagacgcagaaaaacttgtcgcttagcttgcgtttgtggtaagcctcaacctttggaatcatctgcttggaaatatttgatacctgagctggactgtaatggctgccatacatcttttcaattagatcggctatttccctggtggtcacgcccttggagtaaagcttgataatcatgctttccaagatatccgagtgctgcttgtagccaggcagcgtgtgctgatgaaattgaccgttgcgatcccggggcacttgcacttcaattgggccaaattgcgtatcaactttgcggaaataagcaccatttctagagttgccagtattccagccatttctggcatagggatcatagcccagaaaggcagtcaattcagcttctaacaagttattaacagcctgttgtagctctttgcgcaataaatcatttattttgtctggattgaatagagcttgagcaaaatctttggtaaaatcattcatgaaggagttcttctttctgtatgtgtttttttgttcaaaccaatcatacgagaaaggaactcctttttctaatgtttaaagaaataaatttaaggaatcattcatccttacacaaactattttacagtctcacagatatttttttattactaaaatttatatataaatttgattgatcatatataaatttagaatatcaatttgcaacaaaaccgcttacaaactataatgaaattaacatacaatatatattgagaggagaaaaacgaatgacccactactacgaaggctttccacaaagtgaccgcgatgaaaaaatcaagatggtgaatgtggatgaacttgaagaacgtgttaagaaggtaatgccagaaggtgcatattattatattgcttcgggtgcagaaaatgaatggacctggcgtaacaatactgctgcttttaatcattttcaaattgtacctcgtgctttgactgagatggctgatccgcaaactgatactgattttatggggatgcacttaaagacgccaattatgatcgctccaattgcttgtcatggaattgcacataaagatgcggaagtcgcaacgcaaaagggtgctgctatggctggtgcgctctttagttctagtacttatgctaataagagtgtagaagaaattgcagctgcagctccagaagcaccaaggtttttccaactttatttgagtaaagactggaattttaatcagatggtttttgatgcaattaaaaaagctggttatcaaggcattttcttaaccgttgatgctttggtatcaggttatcgtgaagcaaacttgcggactaactttacttatcctgtaccattggacttctttaagcgttaccttggtgcaaaaggtaaaggtcaaagcgtagctcaaatgtacgcttcttctgcgcaaaagattggtcctgaagatgttaaaagaattaagaaagaatcaggtttgccagtctttgttaaaggtgttatgtgtgctgaagatgcctataaagcaattggagccggtgctgatggaatttacgtaactaatcatggtggtcgtgaagttgatggtgctcctgctaccattgatgttttgccagaaattgcgcaagcagtaaatcatcgggtgccaattatctttaattcaggtgtccgtcgtggctctcatatctttaaagctttggctttgggtgctgacattgttggaatcggttgcccatatctttatggtttagccttaggtggtgcgcatggagttgcttcagttattgaacaattaaatgatgaattaaagattgatatgcaattaacgggatgcaagacaattgatgatgttaagcatgctaaattgacgcacattgcttatactgctgataatttgccatctaatactgatccaagcagacgcaaggaatatccggtaactgacgaaaatcaagttaagcaaactgatgcggtatctggtgcttctaagttagaaggaaagccagctccggaaccagagactgataccacaactggtgcttcagtaagataaagcaaaaatataattaatattttcaatatgattgtcattgaataaatgatagtcatatttttttactatcaagaactcagcggctacaatcaaggtgaaagcgattcgatttttggagaggaaaattaaattattgaagagaataatgttttgactgatactgaagagcttaaaatcttgagtgatcttgttgcaataaaatccgttaatgataatgaaattttagtagcaaaatatttacaaaaactattaggagaacatggaattagttcacgtttgttggaatattccacaactcgcgcagatttatttgctgaaatcggaacaggccatcccattttagcaatttgtggtcacatggatgttgtttcaccaggtgaattagatcaatggcatactgatccctttaaattaaccaataaggatggtaaattgtacggccgcggagcgactgatatgaagtctggtttagctgccttggttattgccatgattaatattcatgaacaccatttaattaagcatggtagtatcaggctgctagctacttttggttggtgaaccttctggctacagtattgccattgctcataagggttcgatggatactaagttaacttcccaaggcaaggaagctcatagctcaatgcctgaaaagggttataatgcgatcgatccattaatggatttattagttaaggccaacaaggcttttagagaaacagataaaaacaatccagacttaggtaagttgacgttcaatactactgtttttactggcggggaacaggtcaacatgattcccggagaggctaccgcgcaaattaatgtgcggactattcctgagttcaataatagtttggttgaaaagaaattaactgaattagttaaggcagaaaatgcgcaaggagctaaaatcaaaatgtacatctatatgtcggaaccttcaattaaaactgacggtaagtctgaatttgtaaaattagcccaaaaaattggagcaaaatatgcggaaaagccgattccaacagttgctattaaaccagtaactgatgcttcgaatttgattgccgacaaaggacctagctatccgtttgccatgtttggtcccggtaatgacacgccgcaccaagttaacgaatatgttgatgaaaagatgtatttgaactttgtgaagatctatactgaattgtttgtggcctatttgaataaataatttggaaagtaataaagagcctaggcaaaattttagcctagacttttttattgtattttgaagtattctttagccgcatcactcatccgttcaggggtccaaacaggataccagacaaattctacatcaacatttttaacttcagggacttttttaacggctgttgtaatctgcttgatcaaataatcagtcaaaggacaggcaggtgtagttaatgtcatattgatgagacagatcccatcttgatcgaggtcaatttcataaatcagccccaagttgaccacatcgacgtttaattctgggtcaataacttgagctaaatgttcaataatatcgtttttaattgttttgctatcacgcattgtgttacctacgcatctttaccaaaaatttttgctttaattgcttgacctgttggtgtaccagctaaaccgccgattccagtttcacgcagagatgccggcatttgatgaccaactttcttcattgcttcaatacattcatcagctgggattacacttgtacatcccgctagcgccatatcagctgcgataagtgcattaccagcgccaataccatttcttttgacgcagggaacttcaaccaaaccggcaatcggatcacagactaacccaagcaagttagacatcgcaatcgataaagcttgggcactttgttcagcactgccaccagctacttcaactgccgcggcagcacccatggctgaggcactaccgacttctgcttgacagccgccagttgcccccgcaatttcggcattattggcaatcaccatgccaaaaccgccagcagtaaaaagaaagcgaatcatttgctcttcgctgagctgtaatcttttttctaataaaaatagaacgccaggtaaagtgccggaagaaccagccgtcggggtagcgcagacaacgcccatcgctgcattgacttcgttagtggctatggcattttcaactgctgccatcattgtatcgcctgaaagtgtgtgtcctttctcgcgatattttttcagcttaattgcttcgccaccagttaagccagtttttgaaaagacaccgtttccagattcacctcttttaacggcagctcgcatagtttgcaagttatatttcatgcgctgccagactttttctcgtggcaagcctgatagttgacattcttgttcaataattaattcagaaataggtttgtgcgttttttctgctgcagcaacaatttccttaatatggttatacataatattgccctatgttataaacaaataatattctcaaattttttatttagttcttgcaataaatcaggatgaagataattttctacatcatattcataaatattatagtttttagtatgaaaaattcgtttgcgactaaagggtgctttttcgtgtaagagcgcggtaagctcttgttcaatgcgaatatttttgtgtggatcaactaaaataataataggtaatgcaccagcaggttgaatctcggtattatgtaagacaattttgcgaatttcaattgcaccaccaccgatagagcatccagccaattccactttctttttatcattagacatatttaaaatagcagtattagggtgaccaattgggctaggaccatcttcttcaacaaaacgtaaatctacgccgcgctggcgtgcaatctcaggtgcctttggtacgcgtagatcgtctgagtcaaagcctaaaatacctgccgcaatagcatagtctgttccatgaccacggtgagtttgggcgaaagagtcgtaataatgaacggtaactttactcggggtaccgccaaaaagtttgtaaccagcgcgtccaatagcgacggctccggccgtatgtgaacttgatggtcccaccattacggggccaataatgtcaaaaacacttttataccgattagtcattttaatccctgctttgtaagttattctgtttttaattataacgaataataaagaagattaagaaagttttttggagactgtaaaatagtttgtgtaaggatgaatgattccttaaatttatttctttaaacattagaaaaaggagttcctttctcgtatgattggtttgaacaaaaaaacacatacagaaagaagaactccttcatgaatgattttaccaaagattttgctcaagctctattcaatccagacaaaataaatgatttattgcgcaaagagctacaacaggctgttaataacttgttagaagctgaattgactgcctttctgggctatgatccctatgccagaaatggctggaatactggcaactctagaaatggtgcttatttccgcaaagttgatacgcaatttggcccaattgaagtgcaagtgcctcgggatcgcaacggtcaatttcatcagcacacgctgcctggctacaagcagcactcggatatcttggaaagcatgattatcaagctttactccaagggcgtgaccaccagggaaatagccgatctaattgaaaagatgtatggcagccattacagtccagctcaggtatcaaatatttccaagcagatgattccaaaggttgaggcttaccacaaacgcaagctaagcgacaagtttttctgcgtctatttggatgcgacataccttcctttgcgccgagaaacatttgagcgtgaagcagtctatattgccattggcatcaagcctaatgggcacaaggaggtcattgactactgcattgcgcctagcgagaacattgaagtctggacagatatgcttcaaaacatgaaatcccgaggcttaaagcaagttgagctttttctttctgatggtgttgttggcatgaaaacagccttggccaggacttatcctaaagctcattttcaacgctgtttggttcatgtcatgcgcaatatctgcgctaaagtacgcgtcgacgatcgtgaaaagatcatgaacgaattcaaacaggtgcatcaacagacaaacaaagaagaagccacagctgtcctgcatgacttctataccaaatggggcaaggtttacagccatgttatcagaagcttgaaagacatagaaccagatctgctggtcttttataactatcccaagcagatcagagcttcaatttattcgactaacatgattgaatcatttaacaatgtgatcaagcgcaaagctaagcctaaggcagagtttccaactgaacagtcgcttgatgcttttattggcattcaggcaatgagctacaatgaccgttatttcaatcgaattcataaaggctttggtcaggttcaggacaccttagaatcctactttgattaaataaataattaaaaaatcaatttacgagaaagatctatttacacaaaagatttgacagtttcgttttttgcaattttaaccgaagttttgtcataataatatgaaaagtgaaagaggttggttaaatgactaaagaaaaagcagaattaaaacaaaatttggagcatctagctgagcaaaagggcagccagcaggcagtttcttatcaagacttgtttacaccacaattgatgcaaaagtatactagttttgctactattgacttttttgtcagagaattgggcgtgaaagactttacgcaaattgagcagatggcgatagatcaagtcgatgaatttgttaaaaaagagaccaagtttgctagctgggaagaaatgcaacaaaaggcggttagcgagtacatgatgaagttattttagcaacaaaaagcgagttagtattaactttaaaactaactcgctcttttatttactatgttaggtgaatgacttgagcacctaattcatcaataaagcgctgatcatgttcaattactagaatagtaggatgatattttttaattaattgaataatttgttcttggttaaagacatctaaatagttcaaaggctcatcccaaagatacaaatttgctggttcaagtaaggacttggctaagtagatctttttttgttggcctgaagacatttgattaattgaattagtgaatatatcacgttcagtacctaatttgtgtaagatattgagaaaatcggcatagttaaggtggtgcttttgggcaaaatcttttaatgataggttattagattgttcaatctgtgataaataggagattgaaatcttatcagctaaatgcaatttgccagtaattgttccagcaaaagtattagtaattgccttaaacaaactagattttcctataccgtttttaccagtaatcacaaattggtgaccacgcattaaatcaaaggtagtaggttggaaaaggggaagcttgtcataagcaaggctaactcctttagcagtaattagatgtttatgatggtcggggacaaaattcatagctaggtcattgtctgcttcaatattttttaaaagaccttttctttcttcgatatttttatctaatcttgcttctacatttttggcaagtttcatttttttggcggctttgtgtcccatgaatcctttatcataaactgtacttctatgtcgaatatcgcctttcatcttggctcccgcatttttgttgctttcggaacgctgggcaaaagtttgcatcttttgttgactggcatggagatttttaatttgcttttctaactttgcattataagcgatattagattcatcctctaattccttttgtttttcataacgagtatagtttccttgttccagcctaattttttgcatttcaattgctagggtgtgatcgacaactttatctacaaaatttcggtcatggctgattacaattaatccttgttttttattatgcagatattgtgctacttgatttcgtgtatcttcatcgaggtgattcgttggttcatctagtagggcaaaagaatgttgattaataaaacaaagcgccagtaaaatttttgtttgttcaccgccactaagtgttgaaaagggctgccaaatgatatcttctttagcatgaagcagatttaattctcgttttaactcccattcctcaaaattaaactgttcttgtaaagcataaatagtaaggttatcgggatcattaattacctgaggatagtaattgaattctaaatcactttgaatagttccttgatattcgacctgttttagcagcattttcataaaagtggttttgccgcgaccattacgaccgattaagccaagtttccaattagaatcgagatttaggtttaaattatcaaaaattttatcctgaccgtcataggcaaatgaaacgttttttagtgaaattgtagacataaaaaagcaccgtcctctcaaactgtgcttatgatctgagaaaatggtgcctgatagattagtccaagttggctaatctataattattcttaatttaaattaaagaaaatcacgcagactaatttctgatcacaagcaaaaagtacatccttaaactagtagaatgcattattttttacttaacgaaaatcagaaattaaaaacgcatcggcgtgattcctcctattacttgaattgattaatctggcaatactttaccatcaaatataattatttgtcaatatttttatgataattcatttgcaagctgtgattaataaggagactgtaaaatagtttgtgtaaggatggatgattccttaaatttatttctttaaacattagaaaaaggagttcctttctcgtatgattggtttgaacaaaaaaacacatacagaaagaagaactccttcatgaatgattttaccaaagattttgctcaagctctattcaatccagacaaaataaatgatttattgcgcaaagaactacaacaggctgttaataacttgctagaagctgaattgactgcctttctgggctatgatccctatgccagaaatggctggaatactggcaactctagaaatggtgcttatttccgcaaagttgatacgcaatttggcccaattgaagtgcaagtgcctcgggatcgcaacggtcaatttcatcagcacacgctgcctgactacaagcagcactcggatatcttggaaagcatgattatcaagctttactccaagggcgtgaccaccagggaaatagccgatctaattgaaaagatgtatggcagccattacagtccagctcaggtatcaaatatttccaagcagatgattccaaaggttgaggcttaccacaaacgcaagctaagcgacaagtttttctgcgtctatttggatgcgacataccttcctttgcgccgagaaacgtttgagcgtgaagcagtctatattgccattggcattaaacctaatggacataaggaagtcattgactactgcattgctcctagtgagaacattgaagtctggacagagatgcttcaaaacatgaagtccagaggcttgaagcaagttgaactctttctttctgatggtgttgttggcatgaaaacagccttggccaggacttatcctaaagctcattttcaacgctgtttggttcatgtcatgcgcaatatctgcgctaaagtacgcgtcgacgatcgtgaaaagatcatgaacgaattcaaacaggtgcatcaacagacaaacaaagaagaagccacagctgtcctgcatgacttctataccaaatggggcaaggtttacagccatgttatcagaagcttgaaagacatagaaccagatctgctggtcttttataactatcccaagcagatcagagcttcaatttattcgactaacatgattgaatcatttaacaatgtgatcaagcgcaaagctaagcctaaggcagagtttccaactgaacagtcgcttgatgcttttattggtattcaggcaatgagctacaatgaccgttatttcaatcgaattcataaaggctttggtcaggttcaggacaccttagaatcctactttgattaaataaataattaaaaaatcaatttacgagaaaaatctatttacacaaaaaatttgacagtttcagattaaatttcttcactactcaattcaaacatattaataattgatttaaacatagataaaagttgtttaactattaaaaatgaattttgtgaatataatgttatcgataacagaaatcatttttatattgcaaatgaaagcgcatacgtttattgttgaatttgaaaaaacatgattttgtggaggaatttatttatgaataaaaagagtggtcataatatcaaatttaaatcaatttttgtatgtacttcagctattatgagtctttggttaggggcaaacttaactacgactcaagttcatgctgcagaagacaatgcagctcctaaaagttcagaagttgtaggccaaacgaattctagcaaagataatgcagctactgctactgtacaaaatcaaagtaacgcaaaagcaaagcagcgtcaacaaggtgtagctcctcaaaacgttcctacagttttggcagccaaaactaaagatgagggaacaaataactctccagcacgtgaggaagttaaagatcagactaaagtagttattcactacaatggtgatggtgaaaaatgggttccttatatttggggtaagaaacctaatggtaacggcaatgaatacaaatgggccggcaaagatgataatgggtattactcggttattgatttagataaaaactatgaccaagtaggagttttaattaaaaccaaaggcagttgggctggtaaagacggtacaggtgctgatcgtagcttaaatgttagcgataatggcaaagcggaagtcttctataaagcaggtagtgatgatgcccaaaaggtaacaccagagtaccattccgcaaatataaatttgcattattacggtgatgaccaagttaataaggttaatgtttggacagataaggatcaagataataaacaacttattagcttaaccaaacaaggcaatagtcaagatggctcaatcaaattagacaatactgattttagtaaactttttgttgcgccagttggttctgatgaaataacaagagaattcactccgttaccgggtaataaggcgacagatatttatttagttaaaaatgatacagaagcttattatagcaagagttttgccttagctgatcaaagtctatcttctgcatatatgacttcaccagatagtttgactgttgaagcaggtaaggctactactgtcgataaaattaaaggaaaacttagtctgcgaaataatagtattgatcatattgaagcagtcgatgctaatgctgatggtaaagcaaagaaatttattattcataccaaaacagatattgatattttaaaggataaccaagttggactagggatgaactttaaaaatgttgatatcggtccttatgttcgttccaaagcttttgacgataaatatgcctatgatggtgacgatctaggctgcacctatgatagtaaaaagacgcaaattaaactctgggctccaactgctaaagatgttgaattgaatttatatgatagtgttgataatagtgccaagcctacgaatgttattgctttgacaagaggcgatagaggtgtttggactggtattattaagggcgataaaaaaggctgggcttatgattttaagttaacttttggtaatggcaaaataacacagactgatgatccatattctaaagccgttactgtcaatggcgttagaagtgtaattgaagactacaataatatcaaaccgacagattttaaccgaatgccttcattctctaagccaactgatgcaatcgtttatgaaatttcaattcgtgactttagtagtgatcctaactcaggaattaaagataaaggtaagttcttagggatgattgaatcaggtaagacaccaactggacaagttactggtttagactatctcaaggcattaggcatcactcatgttcaaattatgccttcatatgatttcgctagcattgatgaaactaagagtttaaagaatcaatacaactggggttacgatccaaagaattatgatgtgcctgaaggatcatattcttctgatccaactaatccaactgctagaattatcgaaatgaaagaaatgattaatggcctgcataaagctggtattagggtcattatggacgtggtatacaaccatgtttataatcctcaagagcaagcttttgaattaacagtgccaggatattatttccgttacgatgctgataataataccacaagtgatagtggctgcggtaatgacattggtagtcaacgtaaaatggttcgcaagtacattgttgactcagtagtttactgggctaagaactacaatctagatggcttccgttttgatatcatgtccttactagatcgagagactatgaatgatgttagagctgctctagataagattgatcctggtattattacttatggtgaaggctgggaagttggtaaccagaaatatactagagaagaaggaacgacccaatacactgcggataaagttcctaatgttggtttctttagtgatgatatgagaaactcggttaaaggtaataatgatggctccgaaccaggattagtaattggtaacggtaatgaaaaaaactttgataagcatgctgtcttgtttaccgatagttttttaagaggtaaatggttacataatgattcttgggagccacataactatgcaactccaagccaaatggttaattatgccgcttgtcatgatggtaagacgttgtatgattacatcaaggctgcaatgccaaatgaatcagatgagaatattgccaggagagtaagattggctaactcaatgatcatgctttcacagggtatttctttcttccactcaggtcaagaagcattaagaactaaaggtggcaattcaaattcatataattcaccagtaaatattaatgaaattaattgggaaagagttggtgctaataaagcatcagtccaatatttccaaaaattggctaaattacgtaaacagctgccaattttgcatttgaatgatttcaataagatttatgacgagaatgttactaaaattattagttatggtagagaaaccaaagataaaaacatcaagggtgtatttgagtacgaatataatgttaatggcaagaagttattaattgtctttaatgtcaacaatgataaagttgctctaaataaagttgatttatcacatggtaagaaattgttagatagtgatggcaatgtgaaattaagtgataaaactatgctggcaccattaagtacacttgtagttgatgaagatggaacaatggttttaccagacgtgccaaaaccagatcagcctgtaagtccaaccactccaggtgataagccaggtaaaccaactacaccagaaaatccaaggattccggatcaaaagccagccaatccaattgttccgcaagaaacaattattacacctgaagctccaagtgaaaatagtattatagacaatactaaaaatataattaatggatcagaagagactactacagtttctactcaggataatacaaccactgaaatattattgacccataatgcttatgtgtatgacagtgaagcaaatcctatttatcaaaatgataacaagcttgtcttgaaagctggagatacaattaagcctttggataatggtaaaaagtatagtattaaaggtaagttgttctataaagtagctaaaaatcaatttgtcaaagttgctaatactgttagttactataagttagctcataactcattcgtttataataagcatggtaaagcagttaagaagaatggaaagcgcattttacttaagaagaataagcatatttcacttcattctgataaggtcgttaagattaaagggaagaaattctatcaattaaaagatggtagctttattaaggctagaaatgttaaaagaattggttagatttagatagttaattaaaaatattaaaaaacaagattgtttccaaaatgggcaatcctgtttttttaatcctgattaatcaagctaacgggcaaagtataaacactctccaatgataccgctggatcattaatttcgcaatctctttagtccgttgccgcgcactaattaaatgtgggaataggttctgaatcaattgtgtgccgtcaaatcctgtaattaacgattttttatttaaataatcgttgcattctttagccaataaagccgtaatgtcatccgtacaacaaatcgcatcgtaatcgttatctttcaaaaattgaaggatagcgattacgatgcgataattgattcacgggcgctaattgagcgtaaatcaaatttaacgtcaaaggtattaaacacacacatcatccctttgatacgatcactgattggataatagtcttctttggaaccagcaataatgattactttcttctttttttgctttaaaaccgactttgcaatttgcatctccgcatcatagttattcgactgcacagtagggatctgcggactaattacccggtcaaaactaaccaccggtagattaagcttgccactcttctttgaaatctgaattggcgagctggtaagtaagcctacgatctttttttgcttatatttatccaaataatactgcatatcttgctcttgataatgatctaaatgcaaaatgcaatcataacctttatcctgcaaaatagtagccaagtattcatacagttctgaatagaaaggattattgatttgcgaaaaattgatttcaattaagtttaattctgttttagcggaaattgcattcttgggtttataacccagttttttgatagcttcctttatttttaaagccgaatcaatgccaacgtaaccattctgattaagatatcgcgaaacggtggcaatagaaacgccggcttttttagctatttctttaatagttactgccatgttttacacctttatatgtaaatcctacacactttctatcagtaagtatagcatattctaaaacctgaattgtcaaattaagtgcaacagttaggctatgaggaaatatattgcttgaagagttcttctgctgtgtgatattgaaggattcgacgatgtttgcggttaatggcatcagttgcctgttgaacataagcagctgacttatctttcatgcttttgcctttagggaagaattgacgcagaagtccattgcagttctcattggtgcctctttcccatggagaatatgggtgggcgaagtagatctggcagcctttgatcttggtcatatccgcaaactcagagccattgtcaaacgtgatcgatttaaaccaggcaggatgtctgtcaatctcattttgaagcagccttgggcatgtgcttgcccgatagtcaggaatcttgataactacttcaaagcgtgtggttctttcggtcaaagtcattaaagcaggctgattcttgcgtctgacgcctttaaccagatctccttcccagtgcagcggcgtttttctgtcttcaatctctttaggacgctgttcaatggaattgccaagatgcttcttgtgcaaagcatgaccgctatggccgtgatgacgcttgttcctgcgtcttttgagcttcataggcagatcaatattgcttatgtccagcaagccctgatcaatatagcgatagacggttggtgtgctgggacaagggtagcctggcatttgaattcaccaacgaattcatcgatgctggtggcatcaaatttagctttaaagcgtctggagagcattctcaaaaagacagcataatgcttcaatggattgcgctgatagcagtttttgcgacgcttctcataatgaagctgtgcagtatcagcgtaatagtgctcatacaataaatagctgctgtctctttgcaggacgcttccgcgtttgatttcgcgactgattgtcgacttatggcagccgacttcttgagcgataacagtacgggaagttatgccggaatccagcattgcttgaatttgtccacgttgtacgctggttaattgatgatagtgcttagaaatgctagaatttgaattggtcatgaagatcttcctttcttgatttttcgtcacttcaagtttaggtcttcatggcctttttgtttaacacttggtgttgcacttcaattttaaatccgggtccattattaattcctttcatagaaaactaaattccttttctaaaggggtcaagagctattatatacagttttctcagcagttacattcgcaaaaaagaaaaatgctaaatttatttaaaatatttagattttttatgcaataaggacaaatagctaggagaaagaacaaagaatatctccccatctattgatgtaacgctaaaacataatttactttctttgtaattttgtgtatactaaatatacacaaaaaagaaagaggcgtacaactatgactgtaaaattaagaaaagttggaaattcaaaaactttaacagttcctaaagatataataattactagtaaagagtatactgtgaaaaatgaggggatgaatatagtttttacacccgtcgtgaagaaaaagaaaaatatttttgcaaccaaagaatggcaaaattatgattatcaaaaagacatagaaaatgacgtggaactacaatcagtaaaaccagtgggacgtgaggtagttgattaatgatttatccgaaaaagggagatattgttaaagcagatgcagaacctcattccggacatgaaatgggtggccataatccgcataaaggtaatattagaagacattatgtggtaatgagtaccagtgcctataataaatcaacacatatgtttatagggatgccgattactacttcagataaatatcaaggcaacccacattacgagccaatattaattccaggcagtaatggcactggagtaaaaggttatgttgttttatggcaacttcagaattttgactttgaatctagaaatggagaaattgttaatcacgtaaatattcagctattagacaaacttcaaggtttcgtgaatgatatggtgggactagaataggtaaaacaattatgccaattttaaggctagttcgattatgctgagaggacgattctgaggtcaagttcgactgcagaggttaaaattaatcatttaatgcaatagaatgctaattcttatttttatgggaaattagcattcttttttgtactttctaactatgtagaataatgagattttattctacatagtacatctaatcatgcattattctgctatgccaattttggggtgtgttgattatgtagtataattagctatagactaattattcaacatagagtgacgaaatacttgtatatcaaggactaatataaaaattgacagaaggagacgtaaattgaagcataaagatactcgtccaattactgatccaataattttaaagaagtttttgaaacatttacgtgaagatactagtatgggagaaagaaactatgctatatttcaaaccggtaaagcaaccttactacgggtaagtgatgttctagctttgaaaaagaatgatgtctttcaagccaatggcagagttaagaaaaatgcttatatcgttgacaaaaagacaaaaaagcctaaccgattatatttaactccagttagggatgttttagaggattactatgattggctgcaagaatatgaaaagaagcatccctacacgaagctgttttcttctgaatggctatttccaagttctaggagattaggtgaggatgttccaataagagaaaatagtttttatagaatttgtcatcagaccgagcttaaaattggggttaattggattggctcacactcaatgagaaaaacaggagcttttatggtttatcagcagactaatcataatactgctttagttatgaaaatgctaaatcactccagtgaagcaatgactttaagatagagaccgtaaaatattttgtgtaaggatgaatatttccttaattttattttcctgaatattagaaaaaggaatccttttcccgtatgattgatttgaacgaaaaacatactagaaaagagattccttcatgaatgattttaccaaagatatggctaatgctctattcaatcaggataaaattaatgatttatttagacaaaagctccaacaggctgtcaatgacctgcttgaatccgaattgactgcctttttaggctacaatccttatgagcgcgatggctggaataccggaaattctagaaatggtgcttattaccgcaaggttgatacgcaattcggacaaatagaaatcaaagttcctagagacagaaacggtgagtttcatcaacacactatgccagattataaaaggcatactgatgttttagagcaaactgttatcaagctctattccaagggcgtcacaacccgagaaatcgctgatttgattgagaaaatgtatggcggctattattctccagctatggtttccaatatttctaaagaaatgattcccaaagttgaggcatatcatcagcgacatctgtcagataagttcttctgcgtttatctcgatgccacctatattcctcttaagcgggtcacttatgagcgcgaagcagtttatatcgccatcggtatcaaacctaatggtcataaagaagtgattgactactgtattgcgcctactgaaaatattgagatttggagcgaaatgctcaaaggcttcaagagtcgcggccttgaacaggtagagctcttcttgtctgacggagtagttggcatgaaagaggctatctgccagtcctatcctaaagcgcattttcaacgctgcttggtacacgtcatgcgtaatatcagtgccaaaatgcgggttgacgatcgaaaaaaagcactggatgaattcaagcagattcatactcagtcaaacaaagaaatggctgtacaggtgctgcatgaattctatcaaaactgggaaaaagcctacaaaaacgtagttagagatcttagacaggttgagcctgatctgttaaccttttacaactatccgccagctattagagcttcaatttactcaactaacatgattgaatcctttaacaacaggcttaagcggaaaaccaagcctaaaacagaatttccaactgagcagtcgcttgacacctttattggagttcaggcaatggattacaatgaccgttactttaacaggattcataaaggatttgggcaagttcgagacaccctagaatcctattttgattaaaagataaataaaaaagtcaatcaacgagagagattatttacacaaacttcttgacagtctctaatgtcttaactgttaacttaggaaaatgtcctaattgtagtaagtatgacataatttcctttattggaggttatagttagagtgaataggattgatttaactatgaaatatgatgaacagtacaaagtcattaaggatcttgtagatcacaacggcaataagaaaagagcagccttgaagctaggaatatccgttagacaaataaacaggagaatcaagcagtatcaagctaaaggaaaagcggccttcgttcatgggaacaaagaccgcaaacctgttaattgtctcaccacagaaattaacaatcaaattgtaaccttataccgtactaaatatcaagactgcaatataaaacattttgtacagctgttagatcgctttgaggacattcatgtctcttataccaaagcttacagcctgctcaagcagcaggatattctttcccctaagccttggagaaagactaagcgtgccttagccaaaaagaaatggcataagcagcaccctaagcaaagcaaacaagaagtcagcgctgcagttgatcatcaactagctttggcagatgctcatcctcgccatgaaagatgcaagtacttcggcgaagaaattcagatggatgcttctgtcttagtctggtttggtaagcgtaaggcttacctgcaccttgcaatcgacaacgctactggcattattgttggggcttattttgactgggaagagactttgaatggctactatcacgtctttgagcaaattcttaaggaatatggcattcccctttgctttaagactgataatcggactgtattcaattatgagactgctcaaaccaaagctgcccataaagatgtgctgacacaatttggctatgcctgcaaaactcttggcgtagatctaaaaactactagtgtttctcaagccaaaggcatggttgaaagagctaaccaaaccgtccaaggtcgccttaagccagaactaagattggctggaatcatgacaatcaacgaggcaaataaatacctgcatgatgtgtttgttcctgactttaaccaaaacttcagtcagactagtcgtaaagcctggtatgtttttgaaaaggctcctgatgactgcaaaatcaattataccttggccgttctcactggcagagtgtttgatagcggctcagctatttctttcaaaaacaagctttatcaagcaacagatgaatatggcaaattagtctgcttcatgaaaggaactaaatgtctggtaattgaagccctagatggacaactgctaacgacagtagatgagcatgtatatctgcttaaagaaattcctaagaatgccaaaatatcgccagaagtagaccaagagcctaaaaagaaaaggaccaagaaaaagtggattccaccaatgtcacatccatggaagcgagaatcattcataaagcaacaaaagagagctcataaataccatcaatacgtataaaaatagcggagagcaaattctccgctaataattaaataattttgggacattttcctaaattattgacatatttttatgataattcatttgcaagcgtaagtcctcgtaaattggttttccacctaaaatgtccagaatgtagtaagcaacgaaagtaacaataatcattggcaatacttgctggacagtcccaatcatttcagtcagtagcataattgctgtgaatggtgctttttctattgcaccaaaatatgcggccatggaaatcactaggatatgagggaagtacattggcaaaataatctgcaattttatcataatattggcgcaaattattcccaataatgccccaagaactaggataggcatgaaaataccaccaggtacggaagaatcatatgaaagcattgaaaagacaaaccgaattatcaagaataagatcggtagtaaaaaaagtcccatgatccaaaggctttgacattccaattcaaattgaataaattatcaattaacacatgtgaaccaccgagtaagtgggcattaaatagaccaactggaataattaaaattaaagcctgaattgtcaaattaagtgcaacagttaggctatgaggaaatatattgcttgaagagttcttctgctgtgtgatattggaggattcggcgatatttgtggttaatggcatcagttgcctgttgaacataagcttttgacttgtctttcatgctcttgcccttagggaagaattgacgcaaaagaccattgcagttttcattggtgcccctttcccatggagaatatgggtgagcaaagtaaatctggcagcccttgatcttggtcatatccgcaaactcagagccattgtcaaacgtgattgatttaaaccaggcaggatgtctgtcaatctccttttgaagcagcctttggcatgtgcttgcccgatagtcaggaatcttgataactacttcaaagcgtgtggttctttcagtcaaagtcattaaagcaggctgattcttgcgtctgacgcctttaaccagatctccttcccagtgcagcggagcttttctgtcttcaatctctttaggacgctgttcaatggaattgccaagatgcttcttgtgcaaagcgtgaccgccatggctgtgatgacgcttgttcctgcgtcttttgagcttcataggcagatcaatattgcttatgtccagcaagccctgatcaatatagcgatagacagttggtgtgctgggacaagggtagcctggcatttgaattcaccaacgaattcatcgatgctggtggcatcaaatttagctttaaagcgtctggagagcattctcaaaaagacagcataatgcttcaatggattgcgctgatagcagtttttgcgacgcttctcataataaatctgtgcagtatcagcgtaatagtgctcatacaataaatagctgctgtctctttgcaggacgcttccgcgtttgatttcgcgactgattgtcgacttatggcagccaacttcttgagcgataacagtacgggaagttatgccggaatccagcattgcttgaatttgtccacgttgtacgctggttaattgatgatagtgcttagaaatgctagaatttgaattggtcatgaagatcttcctttcttgatttttcgtcacttcaagtttaggtcttcatggcctttttgtttaacacttagtgttgcacttcaattttaaatccggggttgctaaaaagaaaacaaaaccagtaaaaaagcaattttcagacaaaaaacaagttaagcctaaacagaaggctaagccagataagaggaaagataaagaaaaagcaactagaatctgggatgccgctaaaactgttaaactaaaaaggaaagttaataactggggtgaaaagtcagggcaaacttatcaattctatgatggaaaaaagagtttaaagactaaaaagggtgcaacttaccccaaagtattgactactaatcgatttattctaaataaaaaaacaattgagatcggctacagtccaattggcaaaacaaaatatgactataatgtgcttgccattgctaatgatgattttaaatcgtggcataatacttacttgttctgtttgaaggataaaaatccaattatcttgcttgatcaatctaaaaacgaaaatccaattatggtaaaagtagttaaggatcgcactttaaataaggcttttagcaaattgataaaataaatatgtaaaagcgcaacaaaaaagcatgagaaaattaattctcatgctttttttgaaattgtactcggttaactcgaaattaatcgtggtcaacatcgtctgggaagaatgcaagacgttcgccttcgccaagttcttcttcgatttcaagtaagcggttgtacttttcaacacgttctgaacgagctggagcaccggtcttaagttgaccaccgttaacagcaacagctaagtcagcgatgaaggtgtcaccagtttcacctgaacggtgagaaatcatagtgttgtaaccgttcttacgtgaaagacggatagtttcaagggtttcagtaacagtaccgatttggttcaacttgataagtgaagcgttaccagcaccttccttgatagccttagtcaaaagtgcagggttagtacaaatgaagtcgtcaagaacgatttggatacggtccttgtggctcttagtgaacttaaccataccgtcaacatcgttttcgtcgtatgggtcttccatagaaattaattctgggaattcgtccaaaagcttgtcgtagtaatctgctaattcttcatcagtaagaaccttaccttcaaggtggtacttgtgatcatccttgttgtagaagtatgaagcagcacagtcacatgcaatagcgatatcttcacctggcttgtaaccagccttgatgattgattcgtgaagagccttcaaagcttcttctgagttcttcatgttaggagcgaaaccaccttcgtcacctaaaccagtttcgtaacccatgtcttcaagaaccttcttcaaggtgtggtatacgttaacgatcttttcgaaaccgtcacggaatgaagtcttagcaactggagtgatcatgaattcttgaatgtcgataccgttgtcagcgtgttcaccaccgttgataacgttgtggaaagtttgtggcatttcaagatcagtaccgccaaggtatctgtacaatggaaggtgagcatcgttagcagctgcaactgcaacagccatagatacacctaagatagcgttggcaccaagacgacccttgtttggagtaccgtctaagtcaatcatggtcttgtcaatctttggttggttgtatgggtccatacccttaagagcatcgttaatttcagtgttaacgttgttaacagcctttgaaacacccttaccaccaagacgtgaaccaccgtcacgtaattcaacagcttcgttttcaccagttgaagcacctgatggaacttcagccttacctacgacaccgtttgaaagagtaacgtgaacttcaacagttgggttaccacgtgagtcgaaaatttcaagtgcgtgtacattttcaataactgatttgagcattaataaacctcctcaaaaattatggtatgtttttcataccatacggaacaatttttgctccgctttacatctcaaattttagcctaactttgtgacggtgtaaacatatgaaagcggtttacattttaaaaattagtaaagcagcctaaaaaactctatatcaaaggactataatatatgtattaaaataaatacaaaaaataaggaatctaaaatggaaaatattaaattaattgttgactcaagtgccaatatgaataatgatccggcgcgtaatttggaagtagtgcctctgacaatttcttttggtggtgaggactaccttgataatcaagatttgaatatgaaggaatttttgtccaatatgaaccaaaataatgtggcaggcaaaacaacttgtccaagtattcaagcatggcttgacgcacttgaaggaacagaaaaagcgattatcgtcacaatgaccagcgggatgagtggcactttttcttcagcccttcaggcaaaagcaatgtatgaggaaaaacatcccttgagcaaaattatagtagttgattcaagaagtgcgggacctgagctagcaatcatagtccatggtattgagaaaatgctgcaaggtgaaatgcgctttgtagatctagaagaagcaattgctaagtttagaatgcagactcatttgctttttgttttgcaatcactacataatttatctttaaacggtcgtgtttcaccagctgtagccaaaatcgcaggtttgctcaaaatcaacttgatcggaacagcaagtaaagaaggaaaacttgagccacttactaaggctcgtggaatgaaaaaggccatccgtgaaattattaagtatatgaaggaagataattatcacggtggcgaagtgataatcgatcattgcgaaaatgaaaaagatgcagaaataattaaaaataaaatattggaggaataccctgaagctcaaattactattcgtccaatgcatgctttatgtagtttctatgctgaagaaggcggcattatggtaggctttcatgaataaaaaataaggatcacgctcaagtgctgaacgtgatcctttttaaatcgctaaaaatagttgctgcgaaatactgaaacaaacgattgctaaactagtagcaccaagaacatcagaaggatagtgggcctttaaacttaaacgagagaaaattaccattgcccaaatagctactacggcaataacaaatccggttccaagatctttggcaaatagttgtagtacgattaagcccatggttgtggcacctaaaacatgaccgctgggaaagctatagccatcttctttatcggaatgtaataatggtcgcttgcgccgaataagtttttttagaataataccagaaatgtcagcaaatcctagagttcctaatacccaaagagcggttagatttcgttcttcgtttaaaagtaggcctgctaataatacatcccaaacgaccattagtttaggatcattaataaaagcgataacctgccagctgtagcaatcatgacgtttgaccaattggtggtgaagccagtgatcaaatagattgaaacgacgtgaatttttgatattaaaaataagccagagcaaaactgccgcagacagtagcagtacaaaataattattcattaataagaaaatccccaattactatataagtacaatctattttaaccggaaaaacaaaaataatgctaatctttaaataaaattaacacctgaattgtcaaattaagtgcaacagttaggttatgaagagatatattgcttgaagagttcctctgctgtgtgatattggaggattcggcgatatttgtggttaatggcatcagttgcctgttgaacataagcttttgacttgtctttcatgctcttgctcttagggaagaattgacgcaaaagaccattgcagttctcattggtgcccctttcccatggagaatatgggtgagcaaagtaaatctggcagcccttgatcttggtcatatccgcaaactcagagccattgtcaaacgtgattgatttaaaccaggcaggatgtctgtcaatctcattttgaagcagcctttggcatgtgcttgcccgatagtcaggaatcttgataactacttcaaagcgtgtggttctttcagtcaaagtcattaaagcaggctgattcttgcgtctgacgcctttaaccagatctccttcccagtgcagcggagcttttctgtcttcaacctccttaggacgctgttcaatggaattgccaagatgcttcttgtgcaaagcgtgaccgccatggctgtgatgacgcttgttcctgcgtcttttgagcttcataggcagatcaatattgcttatgtccagcaagccctgatcaatatagcgatagacggttggtgtgctgggacaagggtagcctggcatagtccttttgaattcaccaacgaactcatcgatgctggtggcatcaaatttagctttaaagcgtctggagagcattctcaaaaagacagcataatgcttcaatggattgcgctgatagcagtttttgcgacgcttctcataataaatctgtgcagtatcagcgtaatagtgctcatacaataaatagctgctgtctctttgcaggacgcttccgcgtttgatttcgcgactgattgtcgacttatggcagccaacttcttgagcgataacagtacgggaagttatgccggaatccagcattgcttgaatttgtccacgttgtacgctggttaattgatgatagtgcttagaaatgctagaatttgaattggtcatgaagatcttcctttcttgatttttcgtcacttcaagtttaggtcttcatggcctttttgtttaacacttagtgttgcacttcaattttaaatccgggaataaaattaacattatttttcaattatttagttttggtgattaaatgttggcttagttaacatatcatacttgattaattccttagcatcgaggtcttctttgtttatgtcaacgacattaatttgctgactagtataagtagtgtaatagaaaatccccttgtcaaggttggtaccatcagagtaaatagtgtattcaaatgaattagggccaacttgatcaagtcccttttgttgttcaacagaatgcaaaatatggaagtaattgtctacgttttcttcctcacttttaccaacaggagcgttgaacttgttaaaagctacacgaacaaagcgcgattctgaatccatcccacctggcaaattgcgtgaaccaagcccacggctgtagccattcatattgacctcttttgaaaagttgttcttaggcattgcaggtgaaacatcagcataattatttaaattaaataattgacatgaaaactgaggattgttagtcaggcaaccgacaggattatcataaacgtgcattccatctttatcggtttcaacgacaattgaaacacctgtcttatcggcaattaaccaatgaagtggggatgcctgcatcttgtcagagaaattaaggttaacaatgttgatctttttaagtaataccttagcatccgctacagttgcgcattgacccagaatccagggaataaattcaaatgaagcaatgttgtctttattggcaacttcatcatagtaggtagcattgtcagggtagttaagtcctgccatgcctaaacctttttcattagctgcgtcaaagtagagcggataattaccagcatcaagtgcaataccaaccatagcataatgatgcttcatttcaggcatcttgcggaagttgaaagcataattgcgtggggtaactacaacttgttggccgaaagtaatctcaagatcgaggttacgtccaaaatagtgatcttgtggactgaaaataattgaagtacacataatatataatctcttttctatatctttaaataatgtgctattagcaagtgtagcatttaaatattaaaaatgactaagataaaaaagaccaagcattgcacttggtcttttccacatattgacaaaaggagtgtacaggatttgaacctgcgcgccaaggaaaacttggttcgccggatttcgagtccggtgcattaccactctgccaacactccgtaacaaaagtattataacctacttaactaaataatgccaaaatattttatttttagttaatgtgaatttattaataatttgccttgtcaagaatagaaaataatagtatacttattacaatcatcataaagggagttgtgtttgtcaaattaaacagatcacatatggagggatttttgttgacaaacataattaaaactaaatcattctggttagctacggcgatgaccttattttgttctgtagcaggaattttcttggctaaattgccatacgtaaacttaatcggggcattggtaattgcattgttattagggattgcactgcaaataacgcctcagagcgtacaagctgaagcgaaagctggcatgggttttatttccaacaagtttttaagattagggattatcttgttaggatttagactcaatttgactaagttggctgatgcaggagttaagactatactggttgcggcgctggcagttagtggaacaattgtgcttacttattggcttagccgtaagtttggtgctgaagatgagttagctattttgtcggcttgtggttgtggagtttgtggtgcagctgccgttatgggcgtgtcaccacaaattgagacaagcgatgaagacagaaaaagagaaaacgaagttctagcggtggctgttgtttgtgtcatgggaacggtgtttacattacttgaaatcgtgctcaaaccgcttcttggcttaactgatacacaatatggggtagtagcgggtggatctttacacgaaattgctcatgcggttgcagcgggaagtgcttttggtgaagtcagtttggatagcgctctaattatgaagttatctcgtgtattacttttagcaccggttgctttaattgtgggctattggtaccaaaagcgtttggttacggaaagtgaagcagaacatactagagcaccgaagaaattaccaattccttggttcttgggtggatttatcttaactagtattattggtacatttttaccaatgtctgcgcggactttagacttcttagtgcaagcagcatatgtctttttagggatggcaatggctgcattgggaatttccgttaacttcaaggtaatctttaagcgtggcggttcagtctttggggctgccgcagttagctcaacttgtttgttggtattcatgattattatgagtaaaattttcttttaaacttacttaaaaatgtgcttgttcgggcacattttttattacataaaacatataatttgataaaagcgataacaaaatatataatagttatataaagtaagttactaattgaaagagggctaatttatgaagtatcctaaaaccaaagaaatattaaatcaagctgttgctgatactactcaattaatgatggttgtccgccaacaacattggtatatgcgtggacctgaatttttaaaattgcacccatatttagacgaggtaatggatgaacttgatgaacaacgtgacttgatctctgaaagattgattacaattgatgggtcaccatattcaagcttacaggaagtgcttgatcatactaagatcgaagctcatcctggtgaatggggaatttcaactagagaaagatttgcgactatcattgctgattatcgttatttggagcacctttatgaagaagggatcaaggtaagtgacgaggaaggcgactatggctcaaatgatatcttaacgtcatgccatacagatattgaaaagagaatctggatgatgcaagctcaaatcggcaaggcccctaagattgatgaataaaatatagattaaatgaatgcgtccacatcctacttgggaaggggatgcatttttgttataatcgaaaactatagaatagaagggggatttttttgcaaataagaactgctactgttcaagatttaagccaagtttgtgctttttacaaacaagtttgtcttgatcaaaaaacggatgattatagtcccgactagcattggggtgtttacccgagtgaagaaggattaaagcagcaaattaataatgcgactgtaattatagctaccgacaatgataaggttattgaactttgtcgatcatgttaataaaaatgcaactaaggagcacgatcgaaaattcttaaaacaattgttagaagagtctggaaaaacattcgatgatttagtagccttaacaaattcgcaagtaagtattttttctgatagtccaattattattgctaatttcactaatggcgcacatttagtagaaatgctggctaattacattaaagaacatggcggcgggttttatttgaacagtcgggttacaaaaataatagatgatggaaccaaagtatcagggttgcaagtgagaaattcagcaggtgaatttactattagtgctaaagctgtagtaattgccacaggcggtgcttcttatgaaaaggatgatcttcttaataaggtcacaccatctgttgctaaggttcatgtctttaacgaagctagtcctgccaatactggtgatggttatagtttactgaaagctgttaatgcagagttttcaaataatgatgtttataagaatggaacgattgattttgccccacaattatttatcacttggaatactgtacctgattattcaaaaacaatgttaattgatgagaatggcaaacgtttttctaatgaggcaccatataatttcttgaatttaagaacggaaatgtacaagcatggaagtgaaaagtattatttgatttatgatggcaaaaaaatggattcatcatttaaggaaaaactagataaagtagaagaaaatccccaagtatatgtacatgccaattcaattgttgaactagctaataaattgaagattgatgcaaatagtctaaaagatacttttgtaaaatatcaaaatgctactgagacaggtaaggatgaatttggcaaagacaaaacgcatcttgaaaagtttactggcaatgacttttatgcagtatatgcaatgccagggtcatggggaacaattaacatgaaaacgaaaagtggagcaacgaagcgagcaattaaactgcaccaatttggtagaatatccaatagaagatagctgtagatatgatcaaagatcataaacacaactgctaaagtttttaattgattgccgtctaggctgaatgcttttttattcaaaatcatcatcctttttatgtaattgataataatcattatactgtattatgtgtctattacaatgctcttggctaaaagatttaatgacttcacttatcctgtgtttatttgataaaaagaaaaagtcaatttttatttttctttcgcagtgatacaagaaagcataaaattaagatgtgaattaaaagtattagaagggacattttatgttaaaaaatattatttttgattttggcaacgtcattatgaattacaatcctgatgaaattttatatcattatcaattaacatcagaagaacatgatttattgagaaaaacgatttttgaatcaaaagaatggtctgaaattgatgcaggaaaaatcgatgaaaaagaggcgactaagatttttattagtcgcgtacctgttgagctgcagaagaaggttaagcaaattatgacaacttggcctgaaaatgtagatttctatgaacctgtttttcgttttatggatcaactaagaaagcaaggctatcatatctacgccttgtctaatacagggatggaatttgctaactttgttaaaaattcttcgatgggtgattattttgatggttttgtcttttctgcacaggaaaaaatgatgaagcctgataagcagatttatcaatgtttgttaaaacgatatgatttaaagccagaagaatgtttatttgttgatgatttggaaaataataccaaagctgcaagtgaattagggatacaggcgttcacgtttaaaattgatcgtttagacgaattgaaaaagaaaattttaggatgaaggatagacgacttaagttaaaacttaagttgtctatttttgcatttcagccgcaaattttgaccacttagtaaattacggttgaaaaatagcaatatgatagtaaacttaaagaaaaataagaataatagctaaaaggtaaaaatgaggagaaagaaaatgttttttgacaaaaatgaagacaatgaagtgaaaattgttgataaagttttaagcaatgatagctttgacaaattgagcgtggatttagtagatattgattttacattggttggcggcgatcagttcgaggtacattaccacggtccagaagataagaggccgattgtgactaatgcgggtaaaactcttgaattaaaagaacctaaggttgaacgcaagaatggtaaattctggaaaagaaagcatgttgaaatcagtattgtgagtcaagatgatattgttgcattaaaagttacagtgccggtagaacataaattagttaacgctactttgaagttgactagtggtgacactgttgtaaaacaagttgagttagagacagtaacatttactgctcttagtggtgatcttcatttgaagaaagtaaaagtagatgaagttgcaataactgaaacttcaggtgatattaaattaaagaaggtattgctaaatcgtggtaagattaagctagttagcggtgactttaccattaaagatagccaaattcttgatgatcttgatgtggcaacgacttcaggtgataatttggctgaaaatattgaagtggatcaatgtgatttgaagactgtagtcggtgataattcaatctttggtggtaaggcaactcatgcataggtaggtaaggagacaaatggcagtcacttagggatgcacacagtgtcaggtgataatacagtaaaataattagaatattaaaaagagaccagctgtcttcatagacaaaccggtctccttttaattaatgctactggttgttattagcaactaatcatttttgcatccaacgttaggaaaatatgcttttcatacttttcttttctttattcagccataggataacaagaccgcccacagattagctatttatgcttctttcttgcgttgggttcaaagaacctaccgaagtcctaaacggattgcttaccgtaaactttcacttgatgtgcgttctatatattgtacctaatagtatcatttaatcttgccgattaagctactcgttcttttctgacctgttatagcatgcttttgatcgcatacgtcacagcaaacaagcttgttggtcattacattgaggttccaattaagttttccgccttaatattaggtcaaaaaccctgatgcaagctgattttcacatcaacttattgtgcttgccagctcagaaaaagccttacgctgaaatacattgactaccatcgcctggcagaaagtcttttggacctatctctgataagaatatctccaagattcagaaaacagcaggtatccttgctgttcgccttatctgacttacaggcaatttacggaaaggattatcagtccgttatacatccgtatcagcagcgtcttctataatatagaagaatgggttgttagacaaatgatattactcgaaaattaaaaatatttttgtcaagggaaaaaggaataactaaatataactgtttactacttttctttatccaacttcatcctcaaaattggataaggattgctttgaccatcagttgctgaacgttccactactttaaatcccatgtgttcatagaatccaactgcttttggattttgttcattgacagctaattcatcaatgtttaacttttgcataccataattcaacaatttcctgccgtatcctttgccgcgtgctttggcattaatgaagagtatctcaactttttgaccattaattcccatgaagcctttaatttgttcatgatcgataatgattaataaatgctccacttgtttaaacgcttgtggtacataattgcgtatttgtaagatttcatcattgtttaaaaatttatatgtggcgcggacgctgctttcccagatggttaaaagttcttgctcagttgattgattaagtttgataatttctttaatttgcataatagttttccttcaatattttggtaatagtttagcatagatggagatttctctgatgctataaacaaaaaacaatgacacttaccgaattaaaaacgccattgcatctaatcaaagaatttgtttagattaacatataatacatgaatatcaagtaacataagcgacttagaatcgtgaggatgactcccgaagaatcttctaggttgctttttcttgtgagggaaacaaatggaagatttatttgcaaaggcaccaattaagcaagtttattttaaattagcactacctgtagtcttgggtatgatcactaccatgatttataatctggcagatacaatgtttgttgccaaaacaggcgatactaatctagttgcaggaattacgatcggtgcgccactttttacttttttaatagctgttgccgacatttttggcttaggtggttcgtcagttatttcccgcttatttggtgagaaaaaatacgagctcagcaaaagaatcagcaatttttgcttgtatggtggaatgattactggtctgtttttaacagtaatcttgctaatctttgaacatcctattttaactatattaggagccaaggcggcaacttataacgatgcagctgatttttatcgtgtgctttccattggagcagtctttattattctgagctttattccacagaacttaattcgaacagagggattagcgattgaggcgatgattgccacaatgacaggaactattttagctatcattttagatccaatttttttatttgttttaaaatggggtgctacaggagtaggaattgccaatattttaggttatgttgtaactgacttgattttagtaattatgattctgcaaaaagcaagattcattactctagatcccaagttaattaaaattaatgcggaatcaatcaaggaagtagtagcaatcggtattcctggatcaattactaattttgctcaaagctttggcatggctttattgaattcgtcactggcaatttatggtgctgataaggtcgctgcaatggggattacacaaaaaatatatggaattgtgattttggtgattgttggttttgcctttggtgcacaacctttattaggctacaactatggtgctcagaattggcggcggcttagagatattcttcgctttgatattttagttcaagttgtatatgcggtaattgttggtggattattaattgtttttgcccgtcctgtcacagcattattcatgaatcagccggatattgttagtgccggtagttacatgttgttagctacgattgttactacgcctgtagtaggaatcgcattggtttatacaactgttttccaatctgttggtaatgcttggggtgcctttattatggcaatcgctagacaaggtgtgatttattttgtggttctagaattgatgaagatgacgctgggctatcacggtattgtttggtctcaagcaattagtgatatattgacatgtgtaattggtttctttatttatgaaaaagctttggatttaaaagataagattggaagcgcaaaaaataaagagtaaataaaaatgagagaaaagctagtgcagatatttctgattcagatgatgcaagtaactacaatatagttagagaattagtagaaggataacgttgagatgatgaatgccttttctgaccttagaattaattttttgcacgatctggtcttgatcattgatgatgaataattttttgatcatgattagcataagaattggttaaatcaaagcatcataatgaccgtttagcatgtaaatagactatcgaaacattatttaaatattcaataactaaaaaataaatccctgaattgtcaaattaagtgcaacagttaggctatgaggaaatatattgcttgaagagttcttctgctgtgtgatattggaggattcggcgatatttgtggttaatggcatcagttgcctgttgaacataagcttttgacttgtctttcatgctcttgcccttagggaagaattgacgcaaaagaccattgcagttttcattggtgcccctttcccatggagaatatgggtgagcaaagtaaatctggcagcccttgatcttggtcatatccgcaaactcagagccattgtcaaacgtgattgatttaaaccaggcaggatgtctgtcaatctccttttgaagcagcctttggcatgtgcttgcccgatagtcaggaatcttgataactacttcaaagcgtgtggttctttcagtcaaagtcattaaagcaggctgattcttgcgtctgacgcctttaaccagatctccttcccagtgcagcggagcttttctgtcttcaatctctttaggacgctgttcaatggaattgccaagatgcttcttgtgcaaagcgtgaccgccatggctgtgatgacgcttgttcctgcgtcttttgagcttcataggcagatcaatattgcttatgtccagcaagccctgatcaatatagcgatagacagttggtgtgctgggacaagggtagcctggcatagtccttttgaattcaccaacgaactcatcgatgctggtggcatcaaatttagctttaaagcgtctggagagcattctcaaaaagacagcataatgcttcaatggattgcgctgatagcagtttttgcgacgcttctcataataaatctgtgcagtatcagcgtaatagtgctcatacaataaatagctgctgtctctttgcaggacgcttccgcgtttgatttcgcgactgattgtcgacttatggcagccaacttcttgagcgataacagtacgggaagttatgccggaatccagcattgcttgaatttgtccacgttgtacgctggttaattgatgatagtgcttagaaatgctagaatttgaattggtcataaagatcttcctttcttgatttttcgtcacttcaagtttaggtcttcatggcctttttgtttaacacttagtgttgcacttcaattttaaatccgggctaaaaaataaatctttttatagaaaaaatatataaccaaacctagtgatacattttggctgtgttttttgcaaaatttctcgctgaaaaacaatttttgcagagaaataaggaatctagattgccttcataaggtcattagctacttgaaaataaaataaccatattttaataattgtttttttatcgtataatgacaaatttgtaaggctttctcttaaacattattctgaaatagttttatactaaaactagatctgagtgtttaataaagtagagaggtcagaataatgagtaaacaagagaagacagatcttgaaaaagatgatattcaagatgtggtaaaaaagttaaaagttgatccacaaaaagggttgacttctcaagaggctcaggctcgcttgcaaaagtacggaccgaatgccattactgctaagcaggaaccaatggggctaaagtttttgaagactttactggtccaattgcttatatgattgaagcagctgcaattatttctgcaattattggccactgggatgactttttcattattattgtattgctgttgttcaatgcctgtattgaattttggcaatctcgtaaagcgtcaaatgcgttagcagcgtggaagaagggcttagctccaactgctacagttttacgtgatggtaaatttgaaacgattgatgcaagcaaattagttccaggcgatattgttaaaattcggctagggcaaatcgtaccagcagatttgcgcttgggactacgcttcaattgatcaagctgccttaactggtgaaagtttgccagtaactaaaaaagttggtgatgaggcctactctggcagtattgttaaaaaaggtgagatgaccggtgttgttattgcaactggctctaatactttctttggtaaaactgctaaattagttgcttcagctggtggtaaaagtcctgctcaagaagcaatgtttaagattggtaatttcttaattatcgttgccgtagttttagcggtaattatggttgcttctattcctgtcgcaatgccaactgtcttttcaattacgttggctttaggtgcgttgaacctatctaagaaaaaggcgattgtttctagactagcttcaattgaagaaatggctggggtagacatcttatgtagtgataagactggtactttaaccaaaaatcaattaaccttgggtgatacaactttaattaacgctaaagatgctcaagatgtaattaaaattggcgccttagcttcaaggaaagaagataatgatccaattgacaacgcagttattaaagctttgaaagatcagagtgttttagctgattggacaatggaaaagtttattccatttgatccagtatctaagcgaattgaagctcatttaattaataataatactaaagaagaattatgggctattaagggtgctccccaggttgtagctaaattaagtagtgatccagatgtccaaaagaaagttctagataccactgatgctttagcaaaaagagggtatcgtgccttaggtgtagctgaaagtaaggatcaaggcaagacttggacaattcttggtgtattgtcgatgttcgatccacctcgggacgattctaagaaaacaattgatgattgtaagcgtgaaggtatcagtgtcaagatgattactggtgatgacaccgcgattgcgattgaaactgctaaaaagttaggcatgggtactaatatttataacgctactaaagtttttcctaagaatcttgatcctgatcatgttccagccgatttggaaaagttgattgcgcaagctgatggttttgccagagttttcccagaacataaatatgcgattgttaaaactttgcaaaagcaaggtcatattgtagcgatgactggtgatggggtcaacgatgcacctgctttgaagcaagctgattgtggtacagcggttgctggagctactgatgctgctagaagtgctgctgccttaattttaacttcacccggtttgtcagttattcaaactgcaatcacagaggcaagaaagatttttgccagaattacaagttacacaatttatcgtgttgctttgacaatgaacattatgttcttggtagttttgtcatcaattttattgaacttccagccattaacagcaattatgatcgtggttatgtcattacttgatgatttaccaatcatgactattgcttatgacaatacctatgtttctaagaagccaatcagatggcagatgaagaagattcttacaacttcatcaattttgggtgtatttgctgtaatccaatcaatgttgcttctatttataggatatatgtcagttaaaaatcctggctcaattagcattttccaagttggaaacctttcacaattgcagacaattatgttcttgcaattagttgctggtgggcacttactattgtttgttactcgtcaaactcgttggttcttcgaaagaccatttccagctccaatacttttctgggcaattgtaattacacaaatttttgctgcatgtgcatgctacttgggctggtttgtaccaaggatttcactatggatgatctgtgagattgggatttataacattgcttggatgtttatattaaatattattcggatgatcatagaaaaagttcaaaaataagtagatacataaaagataaaaagcatggcttcggtcatgctttttgtttggtaaaaattatgcataatgtttgaaggcacttacaacgggtgttattataatggcgaaaagagaaacggtatttttcacataagggtgattcaaatgttagataaaaataaatttgatcaaaaacaaacgtattcgattagaaaattaactattggaactgcttcagttttaattggattgacttttttgggttttagtggaagtcaagtacatgctgctgagactactgctaatcagccagaaaagtcagaacaagttctaactgttgaatctaaacagcaatctactcaaaatagttcatctgttgaaaaggttgaaagaaatggtgatcaatatcaaaataaaattaagacagaaatatcagctgcgtatcagaaattagactctgaggataaaactgatcaagcaattattctcggtgaaaataatacaactagtggactaaaaacaaatggacaaggtaaaaatgctaatataactaacgtgccggctgacggctcaattaagtatgattattctattaccgctaagaacaagaacacgaatcagactcaagtagtttcaagtgcagaagcaggtaagaataataatgccattttaattgagcaaaatgctcaagaccctgaggctcacttaactctagaaaatgtttctaaaactgatcaaatgattggtaatagtaaaaatgactctaaccctaatcctaatgatgaagcagttttaatgatcaatgcatggtattccaataaggaaaaactaagtttgcaaatcagtagtactaaggcagcaaatgtagtctttattaaaaatggtaaggtgattaatgataatgctttgtcagtttattacttggcccaaaatggtacttggtattcttatgaagaaatgatgaaaaactttggcgctgccgcaattagtaacgtaagacagattgggttcagaggagttattcctggtgaaactactgcgcaaatgaatgtacccttgatcattgatccaacaggaaatcaattcaatgaaatagatctaaaagctcaaaacgaccagagtatttatgtacgcacatataaacaaccaaaaaagctttggacagttgatgaagctcagaatactccaattagtttggtaactaggaatcaagatggtagttatgatgctgtcaatataccacaacttattgagagtttaccaaaagttggtgaagttattcagattactaattctggtaatatattggacacaagtggaaaagctttttatgagggtggtagctataagattcaattatcaaagattcaacaggtaattgataaatatggctattcagtgaatccgcaggcaagagatttaaccactttaatgccattttatagttatgatacaaataccagtcataaggtaattattcatggacttaataaagaagatcagaataagagaattttctatgttgaagtacattaaattatcgctactaaagatgagactttaaaccaaggatctaaagaagcgcaagactggaattatcatcaaggtgtaactggagtatttaatgtaagaaatcctaatgctgtctataatggatacttattagaaaatattccagttaatgcacaagatgttcaattggttggcatcatcgatgaaaaaggaaataagactgaaacttgaaagctaagattaacgctccttccccgcgcctcttggctttttcttatcaaaaataaaaacgcaggatctctctgcgttatactttaagtgtcgacctaaaaagtaaaggagatcctgcgcaatgaacagtatagaacaaatcgacacagaaaatgatactaaatccttaatttcttcatttattaatctaattggtctagctaagttaactaaacaagtcaattttaagcgtaaatccaccgtttcattaaccatgattatctcttggctgatgtcagtacattttgctcggctttctttattcagagctaaggatgacaaacgtttttccgttagaactgctcgcaatgtacttaacgatggaagaatcaactggcaaaaactattatgcttgattgcagcccggctcattggctgcttaaaaccatttatcgataaaagacgccgacttgcttttatcgttgacgatacgctgatggctcggtctttttctaaaaagaccgaattgctagctaaagtctatgaccatgacaagcatgagtattggaacggatatcgtggtttaactttaggctggagcgatggcaataccttcttgccggttaactttgccttgatgtcaaccaaaaccaagaaaaatatgattggagctgctcccattactgctgatgaacgttcaatttctggtaaaaggagaaatcaagctcagagaaagatgaatgatgtaactgtagagttgattagacaagccttacgattaggagtagaagctaaatacgtcttattcgattcttggttttcttctccaagaatgttttggattttaaagaagatcggtttagatggacttggcatgatcaagaagagttcaaagatttattacatttatcgccatcgccgctatagcgttaaagacttgtatgatcgttttgctgcttcaaacatccgtaaaaagaaacattatctttattcaagcatagttgaggctcaatatcatggacatagctttttattaaagctcgtctttgtctccaaccgtggaaacaagaacaagtatttggttttagctactactcagacaaagcttagccctgaagaaatcatccaactttatggtcgtagatggcaaattgaaacatattttaagacgtctaagcaatatcttgctttagataaatctcaagttcaaagctatgatggccaatgtggctatatcgcagttacagcaataacttatgatctattgacctggcaggaaagacaaaatacagatgataagacaatcggagatttattctatctaatgaacgaatccttacctgatattagattcgtagatgcattggtctacttaatttcagaattaaaagagcttaaacagaatagttttgaaaagatagatgaagtaatcaatgactttattaaccaactgccacgattcatacaaattgcactgaaacagatcatataaaaactaattacgtctaagaaagctcaatagtgacaggacttgagcttgattttggtgctttcaattttcagaaataagattaataaaattaatggtcaaactccagccggtaaatatattgtgacagtttcctatagattaaatggttctaaagaatcagatatgaagattgaaaatagctatgttgtagacatccttccagtaaaagcaccacagcctgatacacctgatgtaccagaaactccgactcaaccgacaactccaactcagccaactgcaccatcagaaaataatgtggctccacatcctgaaacgatagacaagcaagaaaaaaatattccaccaaaagctgagcgggtaaataagacaaagaaaacgagtaaaataaataaagtagcaaagaataagactgttgctccaaagagtgaaaaagtgtcatcatgtcaatttactaagaaagaaataccagttaagttagccaattctaaggtaagtgcggtatctgttaaagaagttaaacttcaaaaagcagttacacaaaggaatgttttgccacaaactggtgaaaaacaaactgggttgacggctattggggctgtgtttgccgcaatcgcaggaatattcagtcttgcagcttttagaaagagaaactgattaatttaatattcaaaaagcaatagagtcttcagtgaagactctatttttgttgtgtgtcgggcatggcatttgtctagtctagtgaaagtctagatcacgggtagttgtcgccaagtgtagcgaaccacaagccgttagcggtgacgctatgggtgaaggaagtggctagcgagttttccgagcctacgtacagaaacctggtcaggccaaatggtggatgagactgcagcacaagttaaagtccaaaggacaaccgtaaaaccaagacggtaaaccagggggcagtggaaaattaaagatgaatgtcttaccccgagagatctcgtggacaggtgaaaccgagtaagctttaatatcagcgatcgtaagcctggtcgaaaaaggttaatcgcgagaagtcagctgaggtcgtagtagtgctgaaggttttgtaatgaaactggagcgaagggcctaatgtttgtaagagcatatctcgctataagcaatgttcagacagtccggataagaggatagcctagcacaaagagaacgtaactctttgatggtgaaagcaattgggacaattctgaataaatttacaagtagaaatggagatatcacgagatggaactaattgaacagattttaagtcaaaataatctcaaggaagcaatcaggagagtcaaaatcaataagggagcgcctggtgtagacaggagaacagttgatgagcttgatagctattttaaaaagcatcaagtagaaataaaggacgccatcatgaagatgaagtatcgtccgcaagctgttcgcagagtctacattcctaaagctaatggtaagaaacgtcctttaggaatacccacggttgttgaccgagtaatccagcaggctattgcccaagtattaatgaagatctatgatcctcattttagtgagcatagctatggctttagacctggacgcagtgctcatgacgctattgaacaagtcttggaatatttaaacgaaggctatcaatgggttgttgacctggatattgagaaatactttgacacggtaaatcatgataaattaatttcaataattagagagcaagtaaatgacaaaaccaccctccatttaattcgagcctttcttaaagctggagtaatggaagatggttgggttaagcctaataaactaggtgtaccacaaggcgaccctctttcaccaattctatccaatatctatttagataaaatggataaagaattggaacaaagaggcctgcgctttgtccgctatgccgatgactgcaatatctttgtcaaaagcggtaaatcagccaaacgtgtgatgaattcaatttcatcatggctagaaagaaagctattcctaaaggtcaacgcaaccaaaaccaaagttgtacgaccaaccaagagcaactttcttggctttaccttctggaaaagtggcgaatactggcaagcaaagccaggagatgaccgcaaaatcaagctttatgacaagatgagagaacttctctgtcgcagaaaagcagctgctcagcctctatcactagtctttactaagataaatcaagtagttagaggctgggtcaattactttagagttggcgacatgaaatattttctaattaagttcagtcaatggctgcgtcataaagtacgggtggtaatcattaaacaatggaaactaccaaaacgaatatacattaacttaatgcggattaacaaggcactaaagtgcaattttagtgatgaagatattcataaagtagctaatacgcgcttaggttggtataaaagaagtacgggtcatgtcattaactttctgcttagcccaaaagtattgggcataagcaaagcggatcgcccaggcttggtcgatccgctagaatattatttatctcgtaaataatcacaaacgtagcgccggatacggaaccgtacgtccggtgcaatgagaggggcgagttataaaactccctctactctatttttgctttagctcttttttgttaagtatagcaattaagattaccgaagggtttaaatcatgaatcaatttattggtcgcaaaactgaattaagaaatctcgaaccgtcatatttctctttaatctcggtaagtgatacattaaaagcaaccaaagaaatctaacagattggaggaaatactgatggatgagttcgatcaaaatccaggtcgtcgtcatgtagttgatgcatctggtttaaatgtctttttaagtaaaatttatggctatatggcactggctgtctttgtttctgccttgagtgcctatcttacgatgactgtttttgctaggcagatggttgccttaatggttagtcatccgtggacgatgtggctgctattattgttaccaatcgcattaacctttgtcattaactttagagcaactcgaactccagtagccagctttattttattgataattacggcaattatttatggaattacttttgcctttattgcaggcgcttatacagggcaagatattgcttcggccttcgttgcttcggctagcgtattcgtggcaatggcaattatcgggacggtaactaaaaaggacttgagtagatggggttcgtatgcttcagctgcattaattggtttgattgtggcgatgttagttaatttgttcttaaagaacccaatggttagttacattttctcgtttattgcagtgattatttttacagttttaaccgcttgggatgcacaaagaatgaagaatatttacttacaatttggtggagaagtttcaaccaatggcttagcagttctgggtgccttgtagttatatctagattttgtcaacctgttcttacagttcctaactatttttggttataacgatgatcagaactaggtaattcaaaagcgtagtactagttaaatattcttggactattaaggagcatattcaatattacaaaaaagtgtctgggaaaaaactaagtctcagatcatgaaaaaagaacgttgaatttttgtttcaacgctctttttgtatacttttagctccagccttgatattattaaatcatcacaaaataaaaaaggtggaaactaacatgtacaagaattatatcacaggtcaaactgctttaacacttaatctagattttgccattccggccaatcatttggctaatgtcatcagctggtttgtagattcaattccagaagatgttttagtaggcaagactgctaaaacgggccgcccagcctatcatccagccatgatgctcaaaatactgctttttgcttactccagaagagttttttctggcagaaagattgagttgatgctggaagaaaatctgccaatgatgatcttggctgaccagcaaaagatttcatatcatactatcaataattttagatcaagcagccatgccaatgaactgattaaaaagagctttatctacttcactaacctgttagaagatgaaggcttaatcaatgaaggtgctgcttttatcgatggtactaagattgaagctgatgctaaccgctatacatttgtctggcgcaaagcggttgaaaagtatcatgaaaagctgaaaggccaggcagttgaactttatgatgaattgattactaaagaagtagtcaaagaaatggaaaaagaaaaagttcaaactagtcaggggctaaaggaattagctcaagaaactgaagcagaaattaacaagctgactaaagagattgagcaggaaaacaaagccattcctggcggttcacctcgaaaagccaagcgacgtggactaaaaaagattctgcactggctaagaaaagattatgtgccaagaatgcaaaaatatgaagaagccgaagagatctttgccggacgcaacagttattccaaaacagatcatgacgccacctttatgcatatgaaggaagaccacatgaaaaatggtcaattaaagcctggctacaatattcaagcagtcacgaccgatcaatatgtagttgattatgccatctttcctaatccgacagatttcaaaactttggagccggttttggatcaaatgaccgtgttggacaagtttgacaaaatcgtcgccgatgctggctatggcagtgaatacaattattcgatgctggaggaaaaatatccagacaagaagtactttattccctacactatgtatgaaaaagaacagaccaaaaagtataagaatgatccaactaagctaatcaactggtactacaatgaaaaagatgattattacattgatcatcatggcgtcagattcaatttcaaatattacagccagcgcaaggatcgttctactggtcaggtccgtgattttaaggtttatgaggcagacgagttccagctaacgccagaattggaacaattggctaaaacagctagcggccgccagcgccaagttcgctataatcctaactggcaatatttaaaagaaaaagcaaaagaagttctccaaagcgaagaaggcagacacatctatggcatgagaaaatatgatgtagagccagttttcggacatttgaagaacgtatttggcatgcgcagaacgcacctgcgaggtaaagagaaggtcgaaaccgatatcggaattgcctttatgatgatgaatttgaacaaatattgtcaaagaaggtggctgaagggccgatttttattgttaaaaattttaaagagaacaaaaaaacgatcaagattcttaaaaaaggaaatcttgatcgtttttattcatctggaagctagttttttcccagacactttttgatttactttatttgtttatttagcgaaatcatttctaatagactctgagcagtagaggaaccttcattgccagcttttaagccggatcgttgcaaggcttgatcaatattctcagtggttaaaataccaaaagttattgggacttctgctttaagattcatctgcataattgcgtttgtaacattctgaataatcatgctgtaatgatcagtctcacctttaatgacagcgcctaaagtcataataccatcgtagttatttgaattgagaagcttattagcagtaaaaccaatttcaaaagcacctgggacccaatagatatcgatctgatcttcaagtactccaaattgttttaagctagcaatagcaccatcaactaaatgatgggtaacaatttcgttaaacttggatgctacaattgcaacgtgataattattgtttttaaaatttccttcataaatattcatttctgtgttcctcactatagtgcttctaataaatgatggaatttatctcgtttagtttctaaatagtcatgatttaccttattagcaggaatttccaagggaattcttttttcaatagtaataccgttattttctagttgatcaattttatcaggattattagtaagcaaattgatatgactaatacctagatcttttaaaatcttggcagcaataatataatttcgttcatctggcttaaaacctaaaatttcatttgcttcataagtgtcataaccttggtcctgtaaaccataagcttttaatttgttaattaatccaattccacgtccttcttgtcgtaaataaagaattatgccactaccatttttattcatttgcttcatggcagtatgtaattgatcaccgcaatcgcagcgcattgagccaaacgtatcaccagtaaggcattctgaatgaagacgtactaaaactggctttttaggatcaatctttcctttaataatagctaagttttcattggcgaaagccttaattttgaaattgccatatttagtgggaaaatttacaaactctgagcgtttactcacaggactattaatatattcttgtagttctgcaattgttaaaaatggtaagtgatattctttagcaatttctttcagttggggacgacgagccatatggccatcagctttcataacttcacaaatatatgcaacttctggttcgccagcaagatgagctaaggcaatagaagcttctgtgtgaccattacgattcttgatttgatcacctttagcgactaatggaaaacagtgacctggtctaaagaagtcttctggcttggaagtaggatcagcaattgccttgatagttgccgcacgatcataagcagaaatacctgtagtggtggttttgtaatcaacactgattgtaaaagctgtaccgtatggatcagtattattttgttccatttggtagaaatttaaacgttgggcaattgttttacttacaggggtgcaaagtaagccacgagcatgtttggtcataaagttaacattttcaggagtaactttagaccctaagccgatcatatcaccttcagattcacgatcttcatcatcagcaacaatcactaaaccaccatttttcatccattgaattgcattttgaattttttttacgtccattttaaattctcttttctaaatttttagcgacatatttacttaagatatcagtctcaatatttacttctgagccgacatttaacttacttaaatttgtttcatcttgtgtatgaggaattaatccaactgagaaaacattatcatgtgtatccattactgttagcgatacgccattaattgcaatactaccttgtgctacaatctgattttttaagcgagtaggaaaggcaaaccaaacttcaatagcattttcgttagtcctgatttccgtaactttggcaatatcatcaatatgtccagtaactagatgaccttctaatctttgtccgacctgtagtgaacgttcaacatttaattgggcattgatatccaaattcttaaaagtagttttctgataagtttgtggcatcatcgttactacaaaagaagtatcagtgtattgctcaacagttaaacaggttccattaactgcaattgaatcgccaatttgcaagtttttagtaaagtcgggctggcaagcaacagtcataacaatagtttcatcgtttttatcaatagcagcaattcgtgcgtcgccgcgtactagaccactaaacattaatttcaccttcaattctaaaattatcatccaacttttcagcacgtaaattatgtaaagttgttttggagctgggtgaaattcctagctttcctttttgaccaagtaaaattggacttatgtaagtaattaaattgtttacttgaccttcggctagcaaggcattagctagggtaggaccaccttcaacataaaccgactggatctcttcattggtcagtttttttatgacttcggtgattgaagcgtttttcatcaaaaaaattgagatattttcattatgtggagtcttagctaagcttgtattttgagtaaaaatccaagttggacttaacttatccgttaataacttaatatttaaatgattcagtaatctaccacgtcgatctactattattcgaatgggtggaaaatccgtagtgacagtagtcagtaaactaggattatcgataatggcagtatttgatccaatcatgatggcttgataatttgcgcgctctctatgtactcgctgataaacagtttcatttgttatttgagtgcgaatatttttagcctcattaattcgataatctaagctgaccgcctgtttcaacgttatccatggatgattatgttggtagaagtaagtataaaacttgtttagcttctttgcttgatcttctaatacgccaaccgttacttgaatattgtgttgccttaacttggcaatacctttacccgttactagttgatgtggatctacttgcgcaattaccactcgtttaattttgctagagacaattaaatcagagcagggtggctgcttaccataatgactgcatggttctagagtaacgtatagggttgaattaaataattgttctggagttagttttgaaatagcatcacgctcagcatgataataaccataacgaatatgatgacctgtagccaagatattgccatctttaacgatgacagctccaaccatggggttcttccatgtttgatagagtcctttttttgagactgtaaaatagtttgtgtaaggatgaataattccttaaatttatttcttaaaacattagaaaaaggagttcctttctcgtatgattggtttgaacaaaaaaacacatacagaaagaagaactccttcatgaatgattttaccaaaaatatagcacaagctctattcaatcaagacaaaataaacgatttattgcgcaaagagctacaacaggctgttaataacttgctagaagctgaattgactgcctttctgggctatgatccctatgccagaaatggctggaatactggcaattctagaaatggtgcttatttccgcaaggttgatacccagtttggaccaattgaagtgcaagtgcctcgagaccgcaacggtcagtttcatcagcacacgctgcctgactacaagcagcactctgatgttttggaaagcacgattatcaagctctactccaaaggcgtaactaccagagaaatcgctgacttgattgagaaaatgtatggcagtcattatagtccagctcaagtatcaaatatttccaagcagatgctccccaaggttgaggcttatcacaagcgcaagctaagcgacaagtttttctgtgtctatttggatgcgacataccttcctttgcgccgagaaacgtttgagcgtgaagcagtatatattgccattggcattaaacctaatggacataaggaagtcattgattactgcattgctcctagtgagaacattgaagtctggacagagatgcttcaaaacatgaagtccagaggcttgaagcaagttgaactctttctttctgatggtgttgttggcatgaaaacagccttggccaggacttatcctaaagctcattttcaacgctgtttggttcatgtcatgcgcaatatctgcgctaaagtacgcgtcgacgatcgtgaaaagatcatgaacgaattcaaacaggtgcatcaacagacaaacaaaaaagaagctgcagctgtcttgcacaaattctatgccaaatggaataaagcttatagccatgtcatcaaaggtttgaaggaaattgagcccgatctgctagtcttctacaattatcccaaacaaatcagagcttcaatttattcaaccaatatgattgaatcctttaacaacgtcatcaagcgtaaagctaagcctaaggcagaatttccaactgaacagtcgcttgatgcatttattggcatccaggcaatgagctacaatgaccgttatttcaatcgaattcataaaggctttggtcaggttcaggacaccttagaatcctactttgattaaataaataattaaaaaatcaatttacgagaaagatctatttacacaaaagatttgacagtttccttttttcgcttcttggatagctaattgcatatatgcttcatcactgttttccatttctttcacttcctaacagaacaaaaaaagaacctcgaagaattacctcgaggttctaactaacattcaaaaaataatttaagtacagttcctactatcaaaatagaaaagagcacagcaaaattattcttcttccatctagactctaactatcggtaccattaaaggattcaaccgcttatgcgggttgcggactttaccgccggtcgggaatttcaccctgcctcgaagaacattatttaattcattcttagaataaaaccgctttctaaatttgtcaataacttttttaattagaaaaattccaaaggtgataaaatacgctaaatctttttgaaattccttttagtgattattgagggttctataataaaatgaattaacaaaagcaactaatgaacacgagagtgataaaatgaataccaacaaattaactgaattacttaataagatgaatgagtatcgtcccttagatcaagcacaggtaaaggctctagaacaagtcaaaaaagagacaaatttataggatacgcgtggtgctagttaaatcgttttagttaataaaaaagtccaattagactagactcaagttgtaagtaatttaaatagaaaagagtctgatctaattgaactatctcaagcttaagcgtttttctcaccatttacaagttagttttaatcggttaaatgtgatttgtcgctcgctgtataagctttatgcgcctgatggacttaaacatcgtaaaaatgttgatcagaccaagcttcctaatagttctatcttagcgatgctcatttggcaaactgaaattggaattgaatctcaacgaagattctgtaaattcttcgttggcttatctcattctcgttttaaccgtcgagctcgaatgctcttgcctctaattcgttgtatccgtcaggcttggaatcaagaagtaaagacagctggagaatttttgattattgatagtttcccagtgccagtttgccagcctgttcgcaattatcgtgtcaagatctttcggggcgtagctgatattggttataaagcaaccaagaaagtctattattatggcttcaaggtccacgcaatagtaagcgatgatggctatctgcttgactatgcagttactaaagcgtcagtacatgatgccaaagagacagtagaattgatgatcaatgctcatccagccaaccattatcttttaggagatgaaggttatttaagcaaaaatctagctactaatctaaagcacatgggatatgtgctttggacgccatatcgtaaaaatatgcaaggagctagaaggcataatgatcatcaattgatggcaattagaagaagcattgaaagcgacttttctttgcttagttattacaacgctgagaataatcgagcaagaagtccagtaggctttcaacagcggctagaaatagctattttagcttataatatggcatattgtctagaacgatttaactagcaccacgcgtataggatatttattgaaaaatcaatttaattagaaaaaactctaaaatgaagaaaatttcatttgatctacattaaatcttggtttttaaaggttccttttttcgtaaactaagtgtacaaagttaattaatacgaaaagcgaggaattcaattatgaaaaagtttaacattaaaaaagtatcattggcagcagctgcattaggcttagcagcgggtggcgcaagtttattggcgattaaccaggctaatgcttctactggcactcaaacgcaacagagtcaaagcaataacacagaacaaaatcaaagtaatacaggtactgcaagtattaatctttctcaagaagatgcagttaataagttttatgaaaagtatggctcaaaatcaattaaggagattgaactagagcaaaagaagaattcatatgtgtatgaaattgaaggttttgattcacaaaatgaatacaaagttaagattgatgcaagtaatggcaatattttaaaagctgaatctgaaaaattagattcagatgatgaggcgcaagcattagatcttaataatatgatgactcgagagcaagctactcaattggctcaaactcaggtatcaggtcaacctgttgaatggtcattagaaatggatgatgatcagccaatctggaaagtagaatttgaagatggaggtaagaaaaccgaagttgaaattgatgctaaaaatcagaagattataaagactgagactgaagatgatgaaaaagatcatgacaaggattatgaaaaagaaaaaaatgacagtcaagagcaccaaaatactgatgaagattaataagtaactaatagttagaaccgtttgttttaagcaagcggttctttttcataaatgaaattactatacgttttttgaatagtagcatttaatattagtaattttatagacagtctgttttgattagactatgtatataaagtaaacgatagtaaggagaaataatatgaaagcagcagtttttgtagaaccaggtaaagttgaagtaagagaagttccaaagccaaaaatcgatggtgaaaatcaagcaattattcgtgttatacgtgcaagtgtttgtggttcagacttatggtggtttagaggaattgctgatcgtgaaagtgggtctttaattggccatgaggcaattggtgtcgttgaagaagttagtgatgaggtaactaatattaaaccaaatgattttgttctcgtaccatttactcatgaaactgtcaaatcttttgtgtaaatagttctttctcgtaaattgattttttaatcatttatttaatcaaaataggattctaaggtatcctgaacctgaccaaagcctttatgaattcggttgaaatagcggtcattgtagctcattgcctggatgccaataaatgcatcaagcgactgttcagttggaaattctgccttaggcttagctttacgcttgatgacgttgttaaaggattcaatcatattggttgaataaattgaagctctgatttgtttgggataattgtagaagaccagcagatcgggctcaatttccttcaaacctttgatgacattgctataagctttattccatctggcatagaatttgtgcaagacagctgcagcttcttttttgcttgtctgttgatgtatctgcttgaattcgttcatgatcttttcgcggtcatccacccggactttagcacagatattgcgcatgacatgaaccaggcagcgttgaaaatgagctttaggataagtcctggccaaggctgttttcatgccaacaacaccatcagaaagaaagagttcaacttgcttcaagcctctggacttcatgttttgaagcatctctgtccagacttcaatgttctcactaggagcaatgcagtagtcaatgacttccttatgtccattaggtttaatgccaatggcaatatatactgcttcacgctcaaacgtttctcggcgcaaaggaaggtatgtcgcatccaaatagacacagaaaaacttgtcgcttagcttgcgcttgtgataagcctcaaccttggggagcatctgcttggaaatatttgatacttgagctggactataatgactgccatacattttctcaatcaagtcagcgatttctctggtagttacgcctttggagtagagcttgataatcgtgctttccaaaacatcagagtgctgcttgtagtcaggcagcgtgtgctgatgaaactgaccgttgcggtctcgaggcacttgcacttcaattggtccaaactgggtatcaaccttgcggaaataagcaccatttctagaattgccagtattccagccatttctggcatagggatcatagcctagaaaggcagttaactcagcttctagcaagttattaacagcctgttgtagctctttgcgcaataaatcatttattttgtctggattgaatagagcttgagcaaaatctttggtaaaatcattcatgaaggagttcttctttctgtatgtgtttttttgttcaaaccaatcatacgagaaaggaactcctttttctaatgtttaaagaaataaatttaaggaattattcatccttacacaaactattttacagtctcttactcatggatatggtcattgtgttgcatgtattaatggttttgaaggcaattgcttgaatttgaagccgggtactaacggtggctatcaagccgaatttatgaaatatgaaccagcaaactctggattagttaagattcccggtaagccaggagattatactgatgatcaattggcatcccttcaaacattgtcagatgttatggcaactggttaccacgcagcattaaacgctgaagttaagaagggcgatactgttgcagttatcggtgatggtgccgttggtcttgccggtgttattggtgctaagttgttgggcgctgaaaaaatcattcttttatcccaccacgatgatcgtgcacaattaggaaaagaatttggtgcaactgacattgtttcaagtcgtgatgatcaagcagttaaagatgtactggctttaactaaggaaaatgctggtgctgatgcattcttagagtgtgtaggtgctgaaagtgcaattgaacaagctggtcaaattgctcgtccaggtgcggtaatcggtagagtaggtgtaccacatgcagagcctaagtcaaaccaattattctggaaaaatgtcggtcttcgcggtggtattgcttcagtaactaagcctgataaagaagttcttttacaagctgttcttgatggaaaaattaacccaggaaaagtatttactaagagttttgatttagatcatatccaagaagcatacgaagcaatgagcaatcgtgaagcaattaagtcattgattatcgtgaacgaaaaataaataatcgcgcaaagcgtgcgtaaaaacggtcgaaaataaaatcgaccgtttttttgtgtgcgaaagagtataattgtagataaaatagattggcaaggtgacttaagtgagagaaacaaagaatttagaatttaaagagaatcttacaaacacatttttaaaaacggttagtgcgtatgcaaattatggtacaggagaagttaaatttggtataaaggatgatggaacaatgaaactgtcaaatcttttgtgtaaatagatctttctcgtaaattgattttttaattatttatttaatcaaagtaggattctaaggtgtcctgaacctgaccaaagcctttatgaattcgattgaaataacggtcattgtagctcattgcctgaatgccaataaaagcatcaagcgactgttcagttggaaactctgccttaggcttagctttgcgcttgatcacattgttaaatgattcaatcatgttagtcgaataaattgaagctctgatctgcttgggatagttataaaagaccagcagatctggttctatgtctttcaagcttctgataacatggctgtaaaccttgccccatttggtatagaagtcatgcaggacagctgtggcttcttctttgtttgtctgttgatgcacctgtttgaattcgttcatgatcttttcacgatcgtcgacgcgtactttagcgcagatattgcgcatgacatgaaccaaacagcgttgaaaatgagctttaggataagtcctggccaaggctgttttcatgccaacaacaccatcagaaagaaaaagctcaacttgctttaagcctcgggatttcatgttttgaagcatatctgtccagacttcaatgttctcgctaggtgcaatgcagtagtcaatgacctccttgtgcccattaggcttgatgccaatggcaatatagactgcttcacgctcaaatgtttctcggcgcaaaggaaggtatgtcgcatccaaatagacgcagaaaaacttgtcgcttagcttgcgtttgtggtaagcctcaacctttggaatcatctgcttggaaatatttgatacctgagctggactgtaatggctgccatacatcttttcaattagatcggctatgtccctggtggtcacgcccttggagtaaagcttgataatcatgctttccaagatatccgagtgctgcttgtagtcaggcagcgtgtgctgatgaaactgaccgttgcggtctcgaggcacttgcacttcaattggtccaaactgcgtatcaaccttgcggaaataagcaccatttctagaattgccagtattccagccatttctggcatagggatcatagcctagaaaggcagtcaattcagcttctagcaagttattaacagcctgttgtagctctttgcgcaataaatcatttattttgtctggattgaatagagcttgagcaaaatctttggtaaaatcattcatgaaggagttcttctttctgtatgtgttttttttgttcaaaccaatcatacgagaaaggaactcctttttctaatgtttaaagaaataaatttaaggaatcattcatccttacacaaactattttacagtctcggaacaattattggtgtaaaaaatccaattgatttttgtttaaatgtagagaataaaataaatgattccatccagccacatccagattataatttagagattgatgataaaactaatgtagtcacgttgacggtaaaacagggcgataatccaccatatttatataaagcaaaagcttataaaagaaatgatagtgcttcaattgaagtggatagaacagaattatcacaactaattttgattggcgaaaataagacttatgacagtttaacagctgcaaatcaaaatctatcgtttaatattttagaaatggcactaaaagaaaaactaggaattaataaattgacatccgatgtgctaattactcttaatctagaacagaagaatgccggatatactaatgcgggtgaattattagcagataaaaatcattatcgtgggattgatgtcgttcgctttggtgaaaatattaatattatgctggatagggcaaactatgagaatgaatcaattcttaaagagtatgaccaaactattcaaaaatatcggcagtattatcagcgtgaggaaatacatggtgttactcgtaacgttataagtcaaattcctgaagaagcttttcgtgaagcaatagctaatgccttggttcataggacttggaatattaatgctcaaattaaagtttctatgtttgataatcgaatagaagtagtttctccaggaggattacctcataacttgagtaaagatgagtatctgtcaggtcaaatttctattttaagaaatcctattgtggctaatgtcttttttagattgggtttaattgaacaatttggtacaggaataaagagaattaaagattcctatcaaggaagtttagttcaaccacagttcgagatctttgaaaattcaataaaaataattttaccaattctaaaatttattactgatgatttaagcgatgatgaaaagaaagtatttagaaccattcgcgagggtgcaaatacttctacacaaattagtcgagcaagtaattttggtaaaacaaaagttttaaatctacttaaacaactaacaaagcaaggttatgttgagagaattggtgagggtagatctacaaaatatgttttaaataaataatcgcgcgcaaaacgtgcgtaaaaatggtcgaaaagcaaatcgaccgtttttttattgcttagttaaaatctcgtaactccaattaatcagtttgttattataagcaattgctatatttttatctcctgatttgattaatttaattaattttagattctcttcagaaatagaattaacatcgacttcattacagatccattcacctaaagttaaatagattgatttaaagttattgataagcaaaggataaacataattcttggaggccaaggctaaactatgtacataagcaaatatttcttgtgcagcgtccttggaattggtggctttggcaagattttgcatatttgaaatagctgattgcaggcattgttcatcctgttctatacaatctaagcgaacaacatcattttcaattagtttcctgatttcaaaaatcgaatttaaaagtgaaattcggtaatgtcccccgtagaaattaataatttcgttcattgtttgcaaatcgccatcgacacgataatctgctacaaaagccccatatctaggacgaatttctataaaatgtaatgccgctaatttttttaatccggaattgatcacagttcgacttacttgaagttgttcttgtaaaactctttcactgggtaatttatcgccgaggttaaactttcctgttaagattgctgtttttaattgattaacgaagaataaatctgttgcagtgggtacatttattgggtgaaatttcatattattctcctttgcactggtaggaccagaagccaacggctagtttatataaaataactttgtttttctttactttgatcctttttttaattcatattaattataatgaaaacgtaatcatttgaaaacgaaagggttaaaaaatggctgaaaaatatgatgttatcgtagttggggctggcaatggcggcttaatggccgccgcaagttctgctagaatgggcaaaaaaactctattgattgaaagacataatctggctggtggagcagcaaccagttttattcgcggcagatttgagtttgaagtagccttgcatgaattatgtgaatatggtcatgctgataatccgcgtgcagtacgaaaaatgtatgactggttaggtgccaacgtaaaaatgcaagaattaccagatacttatcgctatattatttatggtaaagacggatttgatgttaagatgccagctggtagagaaaattttattaatgcgatggaaaaatatgtaccaggtacttcagaaaagatggaaaagctttttgatctgtgtgagcaaagtatgaatgcgttagcagaaatagcagatggaaaggataaaaaagaagttataaaaaaatatccagcttttatcgagtatgctactaagagttgggatgatgtgcttaacaaattaaaacttcctaaaaaagctcaacaaattcttggagcatattggtgttacattgatattcccactgatgaatttgaatttccgtattttgccactatgttagctacttatgtagaaaacgatgcctatattcctcaaagaagaagtcatgatatgtcaacagcattggcacaagtaatttatgataatggtggtgatgtttggctgagtacaactgtagaaaaaatcttagttgaaaatggtcaagctgttggtgtgcaaattaaaggtgaaaaagtttttgctaaggaagttatttgtggaattactcctcacgcagtttatggcaacatgatggatcaaaagtgtattcctgagtatgctttaaaatatgcaaactcacataaattaggaaccagtgcctttttggtgtatcttgggctaaataaatcctgtcgagaacttggaataaatgactatagtgtgttcattgcttcaacaggtgatactagaaaacaatatgaaaattgtaaaactatggataaaaatgattttatgatcatgaattgcttaaatactgtcattccaaatgcttctcctaagggaactagtgtttgctacattactaaattagttgatgatggtgtttgggataatgttaaacccaaagattatgaaaaacttaaagttaaaatagctaaaaatgctattgatgagtatgaacaggcaacaggtattaaaattagtgattctatagaagagattgcaattgctgcaccaccaacatttgctcgctatatgggaacacctgatggtgaaatttatggctatcattgtgcaccatgggatcaaattattggtagatcaatggatttaaagaacgttgtaaatccactgccacatttatatttctgcgggggtcatggatttatgtgtgatggttacaatgtttcatacactactggtttaactgcagcaaaaatagctgttagtgatattaataatatgggagcagatcatgaataaatttgaagagattaagggaattattgatttaaagaagcttcaaaatgagcgaaaacatgaaattcaaaatgcttcggatgcagagttgcctaaaaaatatccgatgaacattcttgaagaggagcttcatcctgaaacgcaatatttgaaaatcactaagattattgaccgtgacgatgctaagagctttgtatttgtaccagatgaatcaaaaggtaccagcaaacttgcatatttccaagcaggtcaatatatttctttaaaacttcatattggtaaaagttattgtacacgtgcttatgccatttcaagcacacctaagcaggcgctttctggcgaatatatgctcacaattaagttagtcaaaaatgggtatgtaactccttatatttgggagaattggaaggttggcactgaagtagctgcttcgggtcctgctggtcaattattctatgaaccattaagagacaagaagaccattattgctggtggcagcggtattacaccattttactcaatggctggtgcaattgctgatggcacaattgatgcaaatttgattattttatatggaagtagaacgcacaaccatattttgttgggtgatgaattagatagaattgctgccaaaactgataaggtcaaggtcgttaacatattaagtgatgaagaagtagtcatgtggtaataagtcaatgtaaaagttaaattttatttttaattagtttgttttaaaaccaaaatttgcgtgcatgaaactaagccctatttcaagggattttttaacaactattatttactcctccaaaaatgttttagaccaattaatcacctcggtgtttgatagatttgaccatttttgagcagagtgaaaatggtcctggttaattttcttgcacaaagaacgcaagcgcgtttatgcggagaatagaaagcttcatcgtatttcttttgatagtacttccgaaaaacgggatctctttgtctaatcaggttggcagcttcaaccaaataatatcttagataatgatttccgtttttagtcatcggtttgtgttcgctatcaaaattactagattgcttttgacgccaagctagaccagcgtatttagctagctgtgcttcagtgtcaaagcgatcaatactgccgatttcagcgataataccagcggaataaactgacccaattcctggaatagattgtagtattctctcttcaggaagcgtttggacgatatctgtaattgctttatctaagttcttaatcaatttctgattagttttaatttcggcatagtaaacagataatacggcatcaatcgagtctttcatgactttacctaagcgatatgatcctctaacggcttttctgatcgctttagctaaagtctctggatcagagaagcggccacgtcctttggtttgaaggtagtcaattagatcctcgattggcatttcagcgatttcatcgatggttttactatcagtaacaattgacagcatcgttgcgccaaagatagaagttttaatattgtctttgtcaacggtaactagtttgtttacacgataataaagagtttcaatgaagtgctgcttagctctagtgagcgaagatgtgatttcatatctagctctagttaaacgctgtaaagctaagtattcctcttgccgagcaatagtgacatggtatttaccaaagcgtaagtattcagcgatgtaataggcatcagtaggatcattcttattttcttcgtaaacgtcatgaaatcgtttagtgtttttaggattaatgacatcagtttcaagattaattttttgtaaatcttcgtcattggcaaagaaataagcagggtgaaagctatagattgaagtggcttccatgccgataattactttgtcatagctgttctgtttagcaagttgaagaattatctttttgacctcattagcaccaatcaggtcattagaaaaagattggttaagtaaaggtttttgataattttctgagtcagtaatagcgacttgaagatcttttgaactaacgtcaattccgataaaaagtttcattgagaatggcctcctttctagcaaatatttggtcatagatcgatcatcacatgttagtccctaattacagattctaagacaatctcgcaaaatataagtattcataggttcaagctaaaaagctgcgactgaatctgctctgaatcagtaatagccagaatcgatacagcatgtgagtaagtcattagtaaaactgcttgggcggcagactaaaaaagtagtcaaagctacagaaggaaacaacctataccaattgaccaaggtcaatgacaattagagactagcatctgatgatcgaataaacaaactaaaagaataatcattatcactgatttaatttatataatacgatttaatttatataatacgagaaggatatgaacatggctttatcaatcaggccatcattgaaaaatatgctccagcagataagaattattctatttatatgagtggtccagctgcgatgattcattttgtaaatcaagaaattaaaaagttagatcttcgtccagggcaagtaagacaagaaatgtccggttcagtaaatccatactttttcaagaattatcctgaggaagcaaagaataagactttcaacatgacagttaaaacccgtgatcaaatacaagttattccagcaagaagtgatgaaagtttgctggtggcaatggaaagagcaggtattattgccccttcatcatgtcgctcaggcgtttgtggtgcatgtcgttcaagagtagttaatggaaaagtatttattccatttcctggacgtcgtgcagccgatagtgaatacaactatgtcaacacttgtgttacatttctaatttctgatttaacacttcaagtgccagttcatgactacgcgagactgtaaaatagtttgtgtaaggatgaatgattccttaaatttgtttctttaaacattagaaaaaggagttcctttctcgtatgattggtttgaacaaaaaaacacatacagaaagaagaactccttcatgaatgattttaccaaagattttgctcaagctctattcaatccagacaaaataaatgatttattgcgcaaagagctacaacaggctgttaataacttgctagaagctgagttgactgcctttctaggctatgatccctatgccagaaatggctggaatactggcaattctagaaatggtgcttatttccgcaaggttgatacccagtttggaccaattgaagtgcaagtgcctcgagaccgcaacggtcagtttcatcagcacacgctgcctgactacaagcagcactctgatgttttggaaagcacgattatcaagctctactccaaaggcgtaactaccagagaaatcgctgacttgattgagaaaatgtatggcagtcattatagtccagctcaagtatcaaatatttccaagcagatgctccccaaggttgaggcttatcacaagcgcaagctaagcgacaagtttttctgtgtctatttggatgcgacataccttcctttgcgccgagaaacgtttgagcgtgaagcagtctatattgccattggcatcaagcctaatgggcacaaggaggtcattgactactgcattgcacctagcgagaacattgaagtctggacagatatgcttcaaaacatgaaatcccgaggcttaaagcaagttgagctttttctttctgatggtgttgttggcatgaaaacagccttggccaggacttatcctaaagctcattttcaacgctgcttggttcatgtcatgcgcaatatctgtgctaaagtccgggtggatgaccgcgaaaagatcatgaacgaattcaagcagatacatcaacagacaagcaaaaaagaagctgcagctgtcttgcacaaattctatgccagatggaataaagcttatagcaatgtcatcaaaggtttgaaggaaattgagcccgatctgctggtcttctacaattatcccaaacaaatcagagcttcaatttattcaaccaatatgattgaatcctttaacaacgtcatcaagcgtaaagctaagcctaaggcagaatttccaactgaacagtcgcttgatgcatttattggcatccaggcaatgagctacaatgaccgctatttcaaccgaattcataaaggctttggtcaggttcaggataccttagaatcttattttgaataaataattaaaaaatcaatttgcgagaaagaactatttacacaaaagatttgacagtttcgactacgcaaacatgttaggttaaaagtcaagactgaaaataaaattttttttgcgttatattatctatatgttgtatttgatagttaagcagcaataccaaatgtagaaaaagaggatttaaatggcaactttagagatcaaggatttacatgtagaagttgaagacaaagataaaaaaacgagtaaaaagattcttaaaggcgtgaacctaactctcaagacaggtgaaattcatgcaattatgggacctaatggaacaggaaaatcaactttatctgagactatcatggggaatcctcgctatcacataacgcaaggcgatattttgctaaacggtgaaagcattattaacatgccagttgatgaacgcgctagaaaaggattatttttagctatgcagtatccagcagaagttcctggcgtgactaatgctgaatttttgcgggtagcaattaatgctcgccgaccaaaagatgatccgatttcagtgatgacttttttgaatgaattagataaaaatctggatttgctagatatgaaggaagccatgaccgagcgttatctgaatgagggcttttctggcggtgaaaagaaacgtaacgaaattttgcagatgttaatgattaaaccaagttttggcattcttgatgaaatcgactcaggtctagatattgatgccttaagagttgtatcacggggagttaatgccatgcgcggtgacaactttggtgctttaatgattacacactaccagcgtttgcttgattatattgtgcctgacgtggttcatgtcatgatggatggacgtattgttaaagacggtggaccagatttagctaaaaaacttgaaaaagaaggatatgcaggtcttcgcgatgaacttgggttacatattaagttagttgatgaaaattaggggggaaaacgtcaaatgttgagcaaagaaaacatacttgtctcatcaaaggaaaacaacgagccttcctggttaactgatttaaggactagttcttttgaaaagatgcataaactttcttatcccaaaatgcagcgtttttcctatcaagattggccgttgattgctaaagaagattttaagtggcaaaaccaacctgacttttttataaaaaaagagaatcatgatcttcttaacgataagggaatcatcttatgcgatctttttacagcaataaagcaatatccagatttagttaaatccgcattagcttccgttattaaaaatgatgaagataaattaacggcttatcattatgcgtatttaaattcaggcttatttctttatattcctaaaaatacagttttagccgaaccaattacagttactttgaaccctacgcaagatccatatatttcacatttattgattgttacggaggataacagtcaagtgaaattcttggaagaaattcaaaatgaggataaagcagttaaatccgcaaacttaatggtggaaatcgttgcacatccaggtagtcatgttgaattttcatcccttgatgaaatggataaggatacaacgctttactttaatcgccgtgcaagaattgaaaatgatgcacatgttgaatgggcaattgcttttatgaatgactgcaacaccttaggcgatttggattcagaattaattggcgaaggcagttatgcggattctaaggcaattgcagttacaactggtgatcaaagagtcggtattaacaaccgagtaaccaaccgcgggccacattcaactggtttgataaatcaacgtggtgttttacttgaaaattctcaactaatttttaatggaattggtcagattgttcatggtgcacatggctctaaggctgatcaacaaaatagagttttaatgatgtctgataatgcacatggagatgccaacccactgcttttaattgatgaaaatgatgttattgctgctcatgcggctagtgtgggtcctgttgatcaaattcaaatgaattatttaatgagtcgtggtattccatatgatcaagctcaaagattggtaattcgcgggttcttaggggctgttcttgatgcaattcctaataaggaagttcggcaaaagatgattgatattttggaaaaaaaattaattgatggacaaactagacgttaagaaaattaaagcagattttccaattcttaatcaaaaaattaatgatgaaaaattgatctatcttgataatgcagcaactagtcaaatgccgttagttgtagaaaaacagattgaacattttactaattttgatcgcgctaatgttcaccgcggtgttcatactttagggctaagggctacacaaaaatatgaaaatgcccgtcaaaaagtagctgactttattggtgccaaaaatgcaagtgaagttgtatttactagtggttgcacagatagtttgaacttagttgcggcaacttatggtgagcaaaatatccaagctggggatgaaattgttgtttcaattatggaacatcatagcaattttttgccttggcagcagattgctttaagaaagaacgctaagttaaagtttattgaaattgatgctaatggtcgtttagatctggaagatgcaaaaagtaaaattactacaaaaactaaaattgtagcgattactcatgtaagcaatgttttggggacaattaatcctattgcggctttaacaagcttagctcataaaaatggcgcgattgttgtagtagatggcgctcaagccgtcggacactttccggttaatgtgactgatttagatgctgacttttatgcattttcaggacataaaatgtttgcgccaactggagtaggtgtgctttatggcaaaaaagctctgttagaacaaatgccgccttatcgttttggtggtgaaatgattacaaatgtaactagaaaaggagctacctgggcacctgtgcctcaaaagtttgaagcaggaactccgaatatttctggcgtgatcggcgtaggtgccgcaatagattatttaggaaagttagatttaactttaattcaaaaacatgaggatagtttaacagcatatgctttaaaagaattatcaaaaatagatgacttagtggtgtatggtccaaaagactgcagtaatcgtactggtgtgatttcttttaatttaagaaaaattcatccacatgatttagcaacagcacttgatttaaatggtgtagaagttagagcagggcatcattgcgcacaaccattgatggaaagccttaagacagaatcaactgtacgtgctagtttctcaatctataatacaaaaaatgatattgatcaattggttagttcaattcaagaagcaaaggagtttttcggtgagcttagataaattaaaaagtttgtataaagcagttattctcgatcatgctcaaactccacgcaattttggacaacttgctaattatactaatgaaacgactgtttataatccaacttgtggtgataagattcacttaactattttggttgagaatgatcaaattaaagatattgcttttgatggggaaggatgcactattagtaaggcttcagctagtatgatgacccaattggtaaaaggaaaaaatattgaacaggctattagtttttctaggatattttcagacttagcagctggcaaaaaacgtagtgaacaagacatgcaaaaactagaagacgctcaagtcttgataagtattatggaattcccggcgcggattaaatgtgccaccttggcttggtggggattagatcgagcattacttggtaaagaaaacgaggatgaggataatgactaaagcagaagaaatagttaaagatgaagattatcaattcggctttcatgataatgtaaaaccaaaattttcaacgggacatggtttaacagaagatgtaattagacaaatttcggctgaaaagcatgagcccaagtggatgttagattatcgattaaaggccttccatatttatgaaaaaatgccaatgcctagttttggtcctgatctttcgggtttagacttagatgatatgctttattatcaaaaaatgactgataaaaaatatcgtgattggaatgatgtaccacaggatattaaggatacttttgaacgcttaggtgtaccacaagcagaaagaaaatatttagctggttcagctgcccagtatgaatctgagatggtttatcacaagatgaaagagcaatttgataaattagggattatctttacagatactgatactgcattgcaggaatatccagatttattaaaaaaatattttggcaaattagttccaattgatttaaataagttttctgccttaaactgtgctgtttggtcaggtggcacttttatttatgtacctaagggagttcaagtccctgcacctgttcaagcttactttagattaaatgcggaaaattctggtcaattcgaaagaactttgattatcgttgatcaagatgcacaccttgattatgttgagggatgtactgcaccacaatattcatctgactctcttcatgcggctgtggttgaagtaaatgtgttggacaatgcatattgccgttatacaactatccaaaactggtctgataatgtttatagtttggaaactaaaagagccgttgctggcaagcatgctacgatggaatgggttgacggaaatttaggtgccaaggtgaccatgaaatatccgagcgtttatctaaatggtgaaggagcacgtggtaccatgctttcgattgcagtggcacaccacgggattcatcaagattctggagcagggatgtttcataatgcccctaacacttctagctcaattgtttctaagtcaattgccaaaggcggtggctcaactgattatcgaggaagtgttaagttttctaaaaagtcggacggttctaaggcgcatgttgaatgtgacacgattattatggatgatcaatcatcttcagataccatcccaactaatgcgattgaaaactcaaatgtggcgatggaacatgaggcaacagtttctaaaatttctgaagatcaattgtattatttggaaagtcgcggtatttcagaaagaaaagccactgaaatgattattatgggatttgttgaaccgttcaccaagcagctgccaatggaatacgctgttgagcttaatcgattgatcagcttccaaatggaaggagcaattggttaatgttagaaatagaaaatttatctgatcaagaaaaagatgtttaccaggcattaaaagatgtaattgatccagaattgcaagttgatattgttgacttaggcttgatttatggcattgaggtaaatgatcatctttgccagattacgatgacactaactattatgggatgtcctgtgagtgaatggctgaataacgaaattaccaaggcagcagagagcgttgcggaaatcgatgattgtcaaattaaactggtctggtatccgcaatggaatccaaatatgatgtcgcgtattgctcgaatgacactaggaatccatggataggagcaccattgatggaaaatcatagttttatttcatatgctaatggtaaatcgctagctgagattaatagtacgattgcggttcctaaaactaagaatttctttagaatgctttttgcttatacgggacctggcgcattagttgctgtaggttatatggacccaggcaattgggctgcttcaatcaatggtggacagagctttaactttttactgatttctactattttaatttccagtttaatggccatgctgttgcaatatatgtcggctaaattaggaattgttacgcaaatggatttagcgcaggcaattcgtgctagaactagtaagagattgagctttattctttggattgtaattgaattagcaattatggcaacagatgtggcggaagttattggtgcagctattgccttaaaccttttatttaaaattccactagttatagcaacatttatcactatttttgatgtgtttctactattattattgtcaaaggttggtttcagaaaaatagaggctttgatttcatgtttgattatggtgattttatttgtttttgcctatcaagtcatgttagcagagcccaattggagtaagatcttcttgtctgtttttccgagtcccgaactagttgcacaacatcccgtggttaatgggctttccccgttaacaggtagtttaggtattattggtgccactgtgatgccgcataacttttatttgcattcttcaatttgccaaacaagaaagataaatcatcatgatccagatgatgtcaaaaatgcagttcgttttactacttgggattcaaatattcaacttattctagcattctttgttaacgtgcttttgctaattatgggagcagctgtttttaaaagtggagcggttaaagatagttcattttttggactttatgatgctttaagcaatactgcaatgctaagtaatccaattttgatttcagtagctaaaactggaattttatcagttctctttgccatagcacttcttgcttcaggacaaaattctactattacagggactttaactggtcagattgtaatggaaggcttcattcacttgaagatgccactttgggcgagacgattatttactcggctattatccgtaattccagttatcatttgcgttgttatgacagctaacgacacaatttctcagcagcactttgctctcaacatgcttttagaaaattcacaagtcttcttagcttttgctgtcccattttcgattgttccattattaattatgactgatgataaaagaatgatggggcaattcaaaaataggagaagctggtcggtcttaggctggatcagctcgattattttaattttcttgaacttatataatttgccggcaacctttgtttcatttaatataatgcctaagcaagatgccaagattttcgcttatgctattattgtactgattattttattgctggcttggacctgctgggatatggaaaaaagcaaaattagacattaaaagcatttcataataggagaagcaatgtaataaatagtttagatttcattttagcaagtgtaatagcttactttttattatgtaattagatctaaaataaaatcaaaaaatctgaagaaatttaaaatggaggaaaaactatagaagccaaaaatctatttgatactaactttggtaaagttccccaaatatatttagggagaaacaaagtagtcgaaaatgtagttgaatcatttgaagatgttatcaaatatcgattatttacgggatgcgtggagtaggaaaaatttctttattgtctgatattacatcaaatttaactaaaaaaataattcccggatttaaaattgaagtgcaacactaagtgttaaacaaaaaggccatgaagacctaaacttgaagtgacgaaaaatcaagaaaggaagatctttatgaccaattcaaattctagcatttctaagcactatcatcaattaaccagcgtacaacgtggacaaattcaagcaatgctggattccggcataacttcccgtactgttatcgctcaagaagtcggctgccataagtcgacaatcagtcgcgaaatcaaacgcggaagtgtcctgcaaagagacagcagctatttattgtatgagcactattacgctgatactgcacagatttattatgagaagcgtcgcaaaaactgctatcagcgcaatccattgaagcattatgctgtctttttgagaatgctctccagacgctttaaagctaaatttgatgccaccagcatcgatgagttcgttggtgaattcaaaaggactatgccaggctacccttgtcccagcacaccaactgtctatcgctatattgatcagggcttgctggacataagcaatattgatctgcctatgaagctcaaaagacgcaggaacaagcgtcatcacagccatggcggtcacgctttgcacaagaagcatcttggcaattccattgaacagcgtcctaaagagattgaagacagaaaagctccgctgcactgggaaggagatctggttaaaggcgtcagacgcaagaatcagcctgctttaatgactttgactgaaagaaccacacgctttgaagtagttatcaagattcctgactatcgggcaagcacatgaaagacaagtcaaaagcttatgttcaacaggcaaccaatgccattaaccacaaatatcgccgaatcctccaatatcagacagcagaagaactcttcaagcaatatatctcttcataacctaactgttgcacttaatttgacaattcaggaagaattaattatcatatttcccgcaaaaaagttgttgtgcaaaattatcctatcaaagaaacgggagctacctacttgctaaagccatatgagctactagtagaagaaacttataattagacctttgagtcaccaagcgtattagtgcttcggtggctttttacttgtgtgtcgggcatgacatttcatctaatccaatgaaagtttggaccacgggtatttgtcgccaagtgtagtgaaccacaagccgatagcggtgacgctatgggtgaaggaagtggctagcgagttttccgagcctacgtacagaaacctggttaggccaaatggcggataaggctgcgatacaagtcgaagtccaaaagacaaacgtaaagtcaagacggtaaaccaggaggcagtggaaaatcaaagatgaatgtcttaccccgagagatcttgcggacaggcaagctgagcaagctttaacatcagcgatcgtaagcctggtcgaaaaaggttagtcgcaagaagtcagctgaggtcatagtagtgttgaaagtcttgtaatgagactggagcgaaggacctaatgtttgtaagagcatatcccgctataagcaatgttcagatagtccgaataagaggatagcctagcacaaagagaacgtaactctttgatggtgaaagcaattgggatgattctgaataaatttacaagtagaaatggagatattacgagatgaaattaattgaacagattctaagtcagagcaatcttaaagaagcgattcatagagtcaagattaataaaggtgctccgggagtagataaaagaatggttgaagaacttgatagctatttcagaaagcatcaagcagaaattaaatacgcaatcatgaagatgatggatatcaatgggtaattgatttagatattgagaaatattttgacacggtcaatcatgataaattaatttcaataattagagaacgagtaaatgacaaaaccaccctccatttgattcggtcattcttaaaatccggtatcatggaagatggtttggttaagcccaataagattggcgtgcctcaaggcggaccgctttcgccaatcctgtccaagctttataacaagattagagagcttctttgtcgcaggaaagcagctgctcaacctctatcgttagtctttactaaggtaaatcaagtggtcagaggttggattaactactttaaaattggcggtatgaaatactttctatttaaattcagtcaatggctgcgccataagatacgggtagtaatcattaaacaatggaaactgccaagaagaatatacactaatttaatgcggattaacaaggcattaaagtgcaattttagcgacgaagatattcataaagtagctaatacgcgattaggttggtataaacgcagtaccagacatgttgttaactttttgcttagcccaaaagtattgggcataagcaaagcggatcgcccaggcttggtcgatccgctagaatactatttatctcgtagatgattacaaacgtagcgccggatacggaaccgtacgtccggtgcaatgagaggggcgagaattaatctccctctactctattactttatttgtttatttagcgaaatcatttctaatagactctgagcagtagaggaaccttcattgccagcttttaagccggatcgttgcaaggcttgatcaatattctcagtggttaaaataccaaaagttattgggacttctgctttaagattcatctgcataattgcgtttgtaacattctgaataatcatgctgtaatgatcagtctcacctttaatgacagcgcctaaagtcataataccatcgtagttatttgaattgagaagcttattagcagtaaaaccaatttcaaaagcacctgggacccaatagatatcgatctgatcttcaagtactccaaattgctttaaagtagcaatagcaccgtcaactaaatgatgggtaacggtttcgttaaacttggatgctacaattgcaacgtgataattattgtttttaaaatttccttcataaatattcatttctgtgttcctcactatagtgcttctaataaatgatggaatttatctcgtttagtttctaaatagtcatgatttaccttattagcaggaatttccaagggaattcttttttcaatagtaataccgttattttctagttgatcaattttatcaggattattagtaagcaaattgatatgactaatacctagatcttttaaaatcttggcagcaataatataatttcgttcatctggcttaaaacctaaaatttcatttgcttcataagtgtcataaccttggtcctgtaaaccataagcttttaatttgttaattaatccaattccacgtccttcttgtcgtaaataaagaattatgccactaccatttttattcatttgcttcatggcagtatgtaattgatcaccgcaatcgcagcgcattgagccaaacgtatcaccagtaaggcattctgaatgaagacgtactaaaactggctttttaggatcaatctttcctttaataatagctaagttttcattggcgaaagccttaattttgaaattgccatatttagtgggaaaatttacaaactctgagcgtttactcacaggactattaatatattcttgtagttctgcaattgttaaaaatggtaagtgatattctttagcaatttctttcagttggggacgacgagccatatggccatcagctttcataacttcacaaatatatgcaacttctggttcgccagcaagatgagctaaggcaatagaagcttctgtgtgaccattacgattcttgatttgatcacctttagcgactaatggaaaacagtgacctggtctaaagaagtcttctggcttggaagtaggatcagcaattgccttgatagttgccgcacgatcataagcagaaatacctgtagtggtggttttgtaatcaacactgattgtaaaagctgtaccgtatggatcagtattattttgttccatttggtagaaatttaaacgttgggcaattgttttacttacaggggtgcaaagtaagccacgagcatgtttggtcataaagttaacattttcaggagtaactttagaccctaagccgatcatatcaccttcagattcacgatcttcatcatcagcaacaatcactaaaccaccatttttcatccattgaattgcattttgaatttttctaacatccattttaatttctcttttctaaattttttgcaacatattttccgataatgtcggtttccaaatttacttcatcatttatctgtaagttggctaaattagtttcgtcttgagtatgtggaattagacctaccgaaaaactgttatctttaacatccatcactgttaatgaaacgccatttaaagcaatactaccttgaggtacgatctgtgttgataatcgggcaggaaacttaaaccaaatttcaattgcattttcattctgtgctattttagtaactgttgccaaatcatcgatatgtcccgtaacaagatgaccttctaaacgttgaccgacttctaatgaacgctcaacgttaagttgatcaccgttatgcaaattcttaaaaacagttttcttataagtctgaggcatcatggttacaacaaaactagtttcagtaaaactttcaaccgtcaaacaagtcccattaattgcaattgaatcaccgaccgttagctcattagtaaagtctgcagggcacgaaacggttagcttaattgtttgcttgtgtttatcaatttttttaatatgagcatccccgcgaactagaccactaaacatgttttaattcacctgcaattcgttcattgttgccaaaggctgtttttttaacatttgttaaagggacagtttcgtttggtactaaacctgttacgccttcatctccaagaaagatcggcgccgtatatttaattacttcattaacaaaaatttcattcataattgctttttccaaagtagggccaccttctacataaactgactggatttcttttgtactcaaataatcaaatacttcttggatcttgtttgttgctaaatgaataattttgattttagaattagtaaagttgtttttagacatttgcttattttgagtgaaaatccaagtgggatttgtatcacttaataagcgaagtcgtaaatgatttaacagccgtccgcgacgatcaatgataatacggattggcggatagtcacttttgacattagttcttaaaatagggtcatcaatgatagcagtcgaagaaccaatcataattgcttgataatctgcacgttcagaatgcacttgctgatacactgcttgattagtgattggagttcgctgaccgcgcattgcaactttattatctaaactagttgcttctttgactgtgatccagggaaacccatattggtaaaaatagctgtagaacttattaagtttacttgcgtcatcagctaaaacaccagtagttacttgaactccattctcttgtagtttggcaattccttttccagtaactaatttgtgtggatcgatttgtccaactacaacacgtttaatcccacttttgataattaaatctgagcagggaggctgtttaccataatggttgcatggctcaagagtgacatagagagttgaattaaataattgttctggggttaattttgaaatggcatcgcgttctgcatgattttgtccataatggtgatgatagccagtagctaaaacttgaccgtttttaacgattacggcaccaaccataggatttttccatgtttgatagcgaccttttttagcttcttctaaagctaaattcatataaaaattatctttttccattaaaatcacttcctcgtagaacaaaaaagaacctcgagtattctcgaggttcagtaataatattcaaagtcaaataatcaaggcaaacgcaaataagcgttacttattggttattattcttctatcatctagactatactatcggtaccgattatcggattccaccgctttcgcgggttgcggacttcaccgccggtaaggaatttcaccttgcctcgaagaacatttatttaattcaactttatcgtaaaactgaactagctaaatgtcaataattaatttaagcggttacaaacaaaaacagattaaataagggagcgatcggacatcaagctgcaaagatgatgaagaaatcgattaatgcacgcaatcgcatggataagaggattgcagaaaaagaaggaatgctaaagaatattgaaaaagttcctactatgactatgaattttcaggcagattatcatcgtgagattttgcaacttaatgatcttagcttgcaactaaaaaatagtagagaactatttaaaagcttgactttgtctttgaataatcatgaaattattgctattgaaggtaaaaatggttctggaaagtcaacattaattaagtatttactgggtatctctcaaaatctaattgccaaaggtaattatgagctaattgaaagtttgaaaatctcttatttaccacaagaatttgtaatgtatagcggatcattaaaagactttgctaaaaaatatcatttgtcttatgaagctttgttgagcaatcttaagaaaatgggatttgcgcgtgctgattttacaactagaattgaaaaaatgagtatgggacaacagaaacgagtagcttgggctaagtcattgacagaacctgctaatttatatttatgggatgagccagcaaattatttagatgtattcaatcaagatcaattaattaagcttcttaagagtgtgaagccaacgatgttactaattgagcatgatccttacttcattacatcggtagctgatcagcagattaaattaacaaattaactaggtatttctataaaataatcttattaggaaaagtaaaattgtaagatatattggttggaaagtccgattatcataggcataataagctatagaggtgataaacatgaaaaatgaattttgtcacgataaaatgaaatgtcagaaaaattgtccttgtgcagataaggatggcatttgccactgcaaaatggtaaatagtaaagaatgtgtttgcaaggaacaagaaaagtaacaaaagagcgccagtagatttagtttaagtttactggcgctcttttaaataaaaatcacataattttgttgcgtttaactggaaaaagaaatgaaataactggaactattaaataaagaatcattgctagtttggcattgaataatgacagaatgatcaatactacatttaaaaataaagtaaccgtcatttttctaataaaggagcggctaataataattcgcatgatttgggaatagcgcgcagtatgagactgtaaaatagtttgtgtaaggatgaatgattccttaaatttatttctttaaacattagaaaaaggagttcctttctcgtatgattggtttgaacaaaaaaacacatacagaaagaagaactccttcatgaatgattttaccaaagattttgctcaagctctattcaatccagacaaaataaatgatttattgcgcaaagagctacaacaggctgttaataacttgttagaagctgaattgactgcctttctgggctatgatccctatgccagaaatggctggaatactggcaactctagaaatggtgcttatttccgcaaagttgatacgcaatttggcccaattgaagtgcaagtgcctcgggatcgcaacggtcaatttcatcagcacacgctgcctggctacaagcagcactcggatatcttggaaagcatgattatcaagctttactccaagggcgtgaccaccagggaaatagccgatctaattgaaaagatgtatggcagccattacagtccagcccaggtatcaaatatttccaagcagatgattccaaaggttgaggcttaccacaaacgcaagctaagcgacaagtttttctgcgtctatttggatgcgacataccttcctttgcgccgagaaacatttgagcgtgaagcagtctatattgccattggcatcaagcctaatgggcacaaggaggtcattgactactgcattgcgcctagcgagaacattgaagtctggacagatatgcttcaaaacatgaaatcccgaggcttaaagcaagttgagctttttctttctgatggtgttgttggcatgaaaacagccttggccaggacttatcctaaagctcattttcaacgctgtttggttcatgtcatgcgcaatatctgcgctaaagtacgcgtcgacgatcgtgaaaagatcatgaacgaattcaaacaggtgcatcaacagacaaacaaagaagaagccacagctgtcctgcatgacttctataccaaatggggcaaggtttacagccatgttatcagaagcttgaaagacatagaaccagatctgctggtcttttataactatcccaagcagatcagagcttcaatttattcgactaacatgattgaatcatttaacaatgtgatcaagcgcaaagctaagcctaaggcagagtttccaactgaacagtcgcttgatgcttttattggcattcaggcaatgagctacaatgaccgttatttcaatcgaattcataaaggctttggtcaggttcaggacaccttagaatcctactttgattaaataaataattaaaaaatcaatttacgagaaagaactatttacacaaaagatttgacagtttccgcagtatttttagcaccaaaatattgaattagatattctaagattttggcaattaaaaaaacaattccaaagttagctacagcgaaagaagaattttcagccataatccatttagtcatgactggcagaagtgataaatcagctagaaaaaagaagtctagaatggcaatcgcttttgaaggtttgaaaatatagtatgaaaaagataaatgtagatcataccagaagtctgccacaataaaaaaagtgattaaaaagacagcaatgttgctaatgaattgctgataatgaatttcatgcagagcaggttgaatttctaaaacaataattgtaatgataatcgccatcactccatcattaaaggcttgtagatgttcacgtagactttcaggctctttcttttgggcctcagctaattcttttttgatattttttaatttatctttttcttggtctgagaactgattaaaattgtgtcttctgggatttcgtggcatggctattcctccagttaaattaatttattaatcaataattactttagcataattttttacaatcaagctaaaaactgagattgccaaattaatatcataatttgctttttggacaaatataaagcatgatagacagtaatcaaatattaggagggaatagtttgaaaaaaataatcgctaagcctgttggaatgtttgaattattctatgatttagtttttgtgtatgtaatttctcgaattactgcgatgattcatcatcctgttaatggcagtattcctttagttactttttttcaatttttattggttgtaattgtagtaatgcaaatttggctttatcaagttatctattttaaccgatatagcaaaaacagatttttagatattggcggtttagttttaaatatgtttgtagcagtttatctggctaacaatattaatactgaatggcgaattacttttcactattttaatattgcaatggctgttatgatcttaattttattttgtcagtatctatttgtaaaagcagataataatgataaacaagcctttttaattattttaggattggaatttatcttaattattgtaggattaatcatcggctaccctgttggaatttatttttgtataagtggttatattgttggttttattttgccattgtttttaaaagggatgtttaaagctgaacgagtaaattttcctcatttggtagagagagtaagtttaatcgtaattattgcctttggtgaggctattgttaatttgacaagttatttcaatagtaagacaccgttagtttatgctgcttttttgtttttatctttagtattaatgtttgcaagctatgttgtcttatcagatgaattaattgatcatcaccagataagtaaaggctttatttcaatgtatagtcatattgcaattgtagtcgcaatacttttgtcaacagtagcaatacagtatttacaagtgcagaatataaacaaaacttttttatttttcctgattattttttcaatggccttatattatttctcattagctataaatcaagtatataataagagtgaatgtcgatttagtattcgtaatctgttaacattgctactaatttttgcactaggagtaagttacttatgggttgtgataaaatctaaaataggtatttcaatctgcctattaatttggaatttgttatttttcttagaattttatattaaaggcaataaaaatgaattcagatgatcaatttatcaagtgggcgacagatttacaaagtttagctcaagcaggattgcattatggtcatgatgtatttgatcgtgagcgctatgaaaaaatccgtaaaattgcaggcgaaatgatggcagctaggacaggactacctaaagaacaaattaaaacactctttttgggtgatgagggctatcaaacacctaagattgatacgcgagcagcaatttttaaggataataaaattttgcttgtccgtgaaaaaatgactcaggaatggtcattgccaggcggctggaatgattatgaccaaactacagcacaaaattgtgttaaagaggcatatgaagaagcaggtagagtagttagacccgtcaaaattattgcagttcaagatcgtagtcatcataataaaccaattttggccaccaacattacgaaggtattttacttatgcaaagaaattagtggtgaatttaagccgaacgatgaaactgatgcttgtgattattttgcattagataatttaccgaagctttcacttgggcgaaatactgaggaacaaattaccatgtgttttgcggcaaataatgatcctaattggcagactcaatttgaatagaaaatttgaaaaataaataaaaaagttgttgacaacgattatattttgattaaaatagttattaacaaatttaataaatctgaaaacaaagagaaagaagagtaatttagacttaatttacagcgagtctcgttaggtgtgaggagataaatcctaagtttaaatgaaaatcactttcgagttctatttcttaacttaaagtaagaagtagtgggagcacccattatagtgcctacgtatcgtcaagtaattgactgtacgtgaaaggtattgctagcaatagtgatataaataaagggtggtaccacgctcaaagcgtccctcagttgcaatttgcagctgagggtcttttttgtttatcagggatgttttggaggagagaaaatgacagatcatacatcgaaaaaacttacatggaaaaattatctcgttgttgcttccttgctgtttggattattttttggggctggtaacctaatttttccattacatttaggacaactagctggagcaaattggggaacagctgcaattggctttttaatcacaggggttttattgccattattatctgtattagcagtagcaattactcatgcaaacggagtatacgacatcggtaagccgctgggtgccggatttgcagtagtatttatggttttaatccatgccacaatcggaccattgtttggtaccccaagaactgcaaccgtttctttcacagttggtattgcaccatttatgccgaagaatatgcaaagttccgctttacttgttttctcagctttattctttttagctgcttttgctttttcttatcatcaaaataatatcttgtctaacgttggtaaggtattaaatccattattcttggcattattattcctagtgtttcttgtagcttttgctcgtccgttggggaatccacaaactgctgcagtaactgctgcttataagcatggagcattagtaaatggcttcttagagggttataacacaatggatgccttagcaggcttagcctttggggttacagttgttacagctgttcgtggcatgggacaaaaagatgctaaaagtgtttcaaaagttgttgctaaatcaggtgtcttggccgttttagcaatcggttttatctacttgttattgatcttaatgggtgcaatgtctctcggacgctttgcagtttctgataacggtggggtagcctttaaccaaatcgttaacgtttatggcggtgtctttggtcaagctttacttgcattcttattgacagttacctgtttgactactgcagttggtttggttgctgcttttgcgcaagactttcataagcattttcctaaggtaagttaccacgtttggttagcacttagttgcttggcatcattcttagccgctaactttggtttggatcaaatcatttcatggtcaacaccgatgttaatgttcttatatcctttatccatggttttgatcttgctatcagtttgttcaccattgtttaataaggcaggtgtagtttactttttcgtaatcctatttactgttgtaccagctttaggcgatatggtagttgctttcccaagtgtggttagtcaaagttcatttggtttagcagtggcttcacttagaaatcatttgccacttgccagcatgggcttatcatggttagtgccagcactggtaggtttagcaattggtttagttgtatatcatgttagaaataaaaagacagtaccggttttagaagaagactaaaatttgtgtattttagatgaaggcagtgattgccttcatttttttgcttctgagatgaatagttgtgaatagacatgataaaatacgcgtggtgctagttaaatcgttctagacaataagccaaattataagctaaaattgcaatttccaaccggctttgaaagcctatcagactacgtgctcgattgttctcggcattgtaataggtcagaagcgaaaagtcgctttcaattgttctgcgaatagccatcaattgatgatcattgtgctttttagctcctgtcatatttttacgatatggtgtccaaagttcgtaacccatttgttttagctgttgatgcagttctttgcctaaatagccttcgtcgccaagaagatagtaattagatggatgggtattttctatcagttcaactgtctccctggcatcatgaactgatgcctttgttacgacataatcaagaatgtaaccgtcatcgctaacaatggcatgaactttgaaaccatagaagtaaattttcttggtggccttataaccaatgttggcataaccgcgaaaaattttagcacgatagttgcgaattggttggcaaacaggtaccggaaagctgtcaatgatcaagaactgtccattcaggtcaacctttttattcatttcttgccgtatctgataaatcaattgcaatagctgacgtgaacgccgattaaaacgtgagtgtgataaacaattgaaacattcacagaatcttctttgtgattcaattcctgtcttagcttgccagataagtaaagccaaaatcagactgtccgtagttttaatttgatcaatatttcgccgatgagtaaactcagccggtgcatacaaacgataccagtgccgacaaattatcactaaatctttaaaactaacttgtaaatggtggctaaaacgcttaagcttaaggcagttcaatcagatcagactcttttctattattactatttacaagtcgagtctaacaagattggacttttttattaactaaaacgatttaactagcaccacgcgtatgataaaattaaaatgaaattattttaataaggagaaccacatgcttccagtacgatacggtattaacttagcaccagaaattaaagaaaataagattgatattattaagaatgagccttttactgtttgggatgcagatgtaataaatattcaaaagcaaaagtactatttattagttgaaaaagacactagttttccaattttattaactaaacttgataccaaactgtttaatgatgtttttgctaatgcgattaaaagctatgactttattttgtttaaacagcaacaaaaattagtttcagcggtaaagtccaagcaaatgtctttttacgatactaaaagccaagctagtttaatgctagaaaaaattcgtaaacttatagaggataatcaaagcgaatatttaaatttgattgatgttgtaaaagatgaaaagaatatcgtagataagctaactgtaatgtcagcgactatttttgccttggatagtcagattggacaaaattttatttctaagatgattgatgaggttagtacgtatttccctattaagccgcaaaaaccaaatcgaagatataagtatgttgacttagtgccaaaatttgaagatttctctaattttgaaaaatatgaaaataaaccagtaaaaggcaatgaaaagattgttgctaaaattaaagaaaataatcaaaaactcattgatcaatatgctaaatatgtaccagcaggaataggatatatccaacctgatcaaatgctgccggattatctaaatcattatttattacgtaataagatccatttagttactaatgatttaggagaagcgatttcttatttatggattatgatatctaacaataaactacatccgctagaaatagagcagattacaaatactttgaaaaatttctatgtatttttgagtagagtaggtcttattcgtaaaactgatagtaaagaaatagggatgaatattgactgggtagttgaagaaattaattcatactccgatcaaggcctggatgaggatttgataaacgatatgatagcggcaattgaagcaaatccgaaaaagattttggaacttgaagatttagatctgtcttctcaggatttgtctagaattttagaaggcttgcgaaaagatcttgagagtcatgataaaaagcagaaaacacgaaaaaagacaatttttgaaaatcaaactcgcaatcgagctacctatgaaattagagtaaaactaaagtcttttaaaccatctacttggcgtagatttattattagtggcaatacgtcagtgaaaacattagaagttgctatgctagatatgtttaatgcagattttggacatatgtttgatttgctgaataaaaaaacgcaggaacgctttgaaaatgcagaaagtatcgctgaagcgaaagattgggatccggctacaggcatagattatgaaaaagctaaggtttcgtattttgaaaagagagataaattattattaacttatgattatggcgatagctgggaattcgaagtagatattaagaacatcactactgatcaagcagctcctaagtgtccaaagatactttctggaaaaggttatggaataattgatgacattggtggtgtatggtctttgcaagattattacgatacgcctaaagataaagtagatcctgaaatgattgattggttaatgggtggaaaagcaattaatttagataattttaataaggaagaacttaatcaaagaatggaacaatataagaactaaagaaacatactaacctagtgttggatcatgaatcgacggattcacgatctggcactttttattttgtctaaaatagaaagtgaagataaagcaaatcaagtcttcagctttttagacacttgatgtcgtaaaagaaacggactgctttaccacctattcttaagtctcttcgaagtctgtgggcacttagatgccgtgtttagaaaattagaattaataggttgataaagaggtttatcttcacagcggaggttatattatggaatcacaaattattttcggtattgatgttagcagtaaatcttccacagtttgtgtggttaatgaccggatcaaacaaggcgaatcttttagaatctctaatgattcctttggctatcaaaaactttatgagcaactgaaccaatatttgataactcctttagttgttttcgaagctactggtgtttattctctaagcctgcaagctttcttagaggattatcatattaagtatttgaagcttaatccgcttaaagcgaaaaagctaatggacaataatttacgccataataaaactgataaggtagatgcttatcgcctggctttaattcaatttaatgccccgcaaaagctgcgtgatccacagcccagagagtatcatgaacttcagaatgccagtcgctattatgaagaacttactaggagtatagttactactaaaaatcaattgcaccgcaacctccaatccactttcccacaaattgaagaaatactgtctcatccatctggcagaatttattgggcgcttgttagtcttttcccacatgctggatatgttctagaaaagaatgagacacaggtaactcaaatgcttaattctatttctggaataggacaacaaagggcacggtacttaaccacaagattatacgcttttgctagagaagcttatccttatgattccaaagatagtattatcgttagagctattcaaaggaacatttctaatttattttcactccagcaagaacgcgactatgtaattaactacatggaaaagctggctaaagcagtaaacgctcgtgctttatccatctatttgagtatcccaggggttgctagaattacagcagtgagattagtagcagagctcggtgatctaagacggtttagcacttcagctcaaattgatgcgtttgttggcattgatccaggaaggtaccaatctggtgaaaaagacagttctcttggcattaccaagcatggcaatcatattgccagaaaaatactttatcgagttattactcaaatggagacggtaaaggctacgcagccttgccatataactgattattatgacaagaaaaaacgatcttcaaatagacaaggctataagaaaatcgccattgcatcagtccataaactgatacgcacaatgtttgctcttatcaaacatgatcaattatatgattacaacatagccaccgaaaataaaagactttagctgaaatcaaataatcaacttaagtataagcaacctatggaaaaactacaagtattcataggcttatttgtggtactttcgctttttcttaaatttaaactcttatttgctttaaccttattcgcatcattaaaacaagtaaatttattttcttaaatcattgataatacttgactttgggtagaaaaaaaagattaccttagcatatgtgtatgtactgaggcaatcttttttaaattttacagcaacttttttaattcatttacagcagtattataatcgggctcatgagtaatttcatcaacaatttcacgataaacgattttaccgttaggctcaagaatccacacactgcgtgctagtattccagattctggtattagtaagccagtagctttaccaaaagataatttttcatcagacattaattgcatatttttaacaccttcagccgcacaccaattttgttggtctttgatggtattagttgaaatagttaaaaagttaacgtcaggaaactgatccattgttttgttaaaagtcttagtttgaatactgcaaacggaagtgttgatgtctggcacaacgctgattaaagtatttttacctaacaaattatctttagtaacttcttgcttatttttgtctaaaactgtaaagttaggcatttcatcgctaaccttaggtggtgtgccaattaattcaacttcttttcctttaaaagtaactttcatgaaattcctccttttattatcttttaacttaaatatagcaaactcagttcaataacttaaatatttagcttacagatattaatttttaggattttaaattttagcatcctgtattttgaatttaaccacttatttaaatagtgaattcggaaaggaagactttttatgttaattggaacttttagcttattctcaataatgatgttgttaaataattggtctatcaatatttggacattgtttatttttattctttcatacgttgttatttggataacaatcaagttaacacaaaatcgccaaattaagaaacgtaatagctaattaataatctttattcattcgctttatgcatagctaactattagaaactgtcaaatcttttgtgtaaatagttctttctcgtaaattgattttttaatcatttatttaatcaaaataggattctaaggtatcctgaacctgaccaaagcctttatgaattcggtcgaaatagcggtcattgtagctcattgcctggatgccaataaatacatcaagcgactgttcagttggaaattctgccttaggcttagctttacgcttgatgacgttgttaaaggattcaatcatgttggttgaataaattgaagctctgatttgtttgggataattgtagaagaccagcagatcgggctcaatttccctcaaacctttgataacatggctataagctttattccattttgcataaaattcatgcaagacagctgcagcttctttttggcttgtctgttgatgtatctgcttgaattcgttcatgatcttttcgcggtcatccacccggactttagcacagatattgcgcatgacatgaaccaggcagcgttgaaaatgagctttaggataagtcctggccaaggctgttttcatgccaacaacaccatcagaaagaaagagttcaacttgcttcaagcctctggacttcatgttttgaagcatctctgtccagacttcaatgttctcactaggagcaatgcagtaatcaatgacttccttatgtccattaggtttaatgccaatggcaatatatactgcttcacgctcaaacgtttctcggcgcaaaggaaggtatgtcgcatccaaatagacacagaaaaacttgtcgcttagcttgcgcttgtgataagcctcaaccttggggagcatctgcttggaaatatttgatacttgagctggactataatgactgccatacattttctcaatcaagtcagcgatttctctggtagttacgcctttggagtagagcttgataatcgtgctttccaaaacatcagagtgctgcttgtagtcaggcagcgtgtgctgatgaaactgaccgttgcggtctcgaggcacttgcacttcaattggtccaaactgggtatcaaccttgcggaaataagcaccatttctagaattgccagtattccagccatttctggcatagggatcatagcccagaaaggcagtcaattcagcttctagcaagttattaacagcctgttgtagctctttgcgcaataaatcgtttattttgtcttgattgaatagagcttgtgctatatttttggtaaaatcattcatgaaggagttcttctttctgtatgtgtttttttgttcaaaccaatcatacgagaaaggaactcctttttctaatgttttaagaaataaatttaaggaattattcatccttacacaaactattttacagtctcgataaaaaaggttattaagcaatcttccattcaaatagatcgtgaacgagagacgtttgctaacactttgggtatcaccggcgttcaaatgacaactttagattttatttctaatcatcaaaatcaaactgtttcacaacatgaaattgaaaagaaactagatttaaagcgttcaacggtgacaatcatgattcaaagaatggagaaaagagatttagttaaacgcgttactaatgcggtcgataaaagacagaaggatgtttctttaactgctaagagtaaatcacttattcccaagataaaagattatatgcgtcaagatgatcgaaaagttcgtagtcattttacacaagctgaaataaatacggcactaaaagttttaaaatttgtcaaaaatggagaaaaaatggaatcaaataatgaaagaatatcatcaaaagtgtttgcagcagtaattgccacgggattaatgtcattttctggcgttctagttgaaacttcaatgaatattgcttttccaaccttgatgcgtgattttaatgtttcaaccaatgttgtgcaatggatgacttcaatttatttgcttgcagtttcaattatcgtgccaatctctgctgcattaaaaagttcatataaaactaaaagtctatttttaaccgctaattttttgtttttacttggcttaatagttgatgctactgcaccaatttttccggtgctattgatcggaagagtaattcaaggcattggtactggaatcgccctgccattaatgtttaacatcattttagaacaagtgcctaagggtaaagttggtactatgatgggtgtcggcagtatgatcactggaatagcaccagcacttgggccgacctttggcgggattgttctacaggaactgaattggcgctaggttttttggtttttaattccattgattattatttcattgttattaggcatctggggtattgaacaaaaatctgctgttaaaaaagttaagattgatcgccttagctttatcataattgcaatcttctttattgggatgctggttggctttagcaacttaggaacaggacaattgggtgcaactgctattcaaattttgattgctttattagctttagctctgttaatttggagatctaatcgaattaaaatgccaattttggatctaaaattatttaaaaatcatagttttacaggtcatattattggttttttctgcattcaactaatatctttgggcaatgcatttttattgccaaatttcattcaattggttaatcataatactgcttttttagcaggcttgattgttttgccagcaggagttgctggtgcaatcatgggtccaattggtggtcggttgctagataattatggtgcacgcaaacctgttttatttggtgtaagtttgatgttgcttgaaacattgttttttgcagtattacctaatcagatgaataatatttttatattgatagtttatatcatttacatggcagtaatgggaatgatattgggagatgttatgactgatactttggcagtgattgatgagagtgaaactactcaaggcaacgctattctaaatactgctcaacaatttgccggtgctgtcggaacttcaattacttcagcaatcgttgcttctagtcaaaaaggtactaagtcagctgatttaaccagaatcggaacacagcatgcatatatttttcttttatgtttagttattttaatcatggctttatttatcaaatatgttggtagaagaactgcaactaagtaaaggatcacatattcaagatattgctttttcaaaaattatctgctattattttacttacaaaaagtaagtgaaataatttaggagttgataaaatgaatattgaattaggtatctcatcatttggtgaaactacaccattagaaacaacaggaaaagcaattagtcatgatcaaagaatcagagacttattagaagaaatcattcttgcagacaaattgaatattgatgcatttgcaatcggtgaacaccatcgcaaagattttgctgtctcagcaccggaaatcattttagcagctgctgcttcgaaaactaagcaaatccatctttcaagtgctactacaaatctaccaacaattaatccaattagagtttatgaacaatatgcaacaatggatgcaatcgcatcaggaagagttgaaatcatggcaggacgtggatcatttactgaggcatttgatctattcggttatgatttagaaaattacgatgaactttttattgaaaaactagaaatgctactcaaaatgaacaaagaagaaattctcgattggccaaaaggaaagtttacacctagagttgatcataaaggaatttatccgcgcactaaaaagccaatccctatttctgtagctacaggtggaagcatagaatcgactatccgaactgcagagttaggtttgccaatcgtttatgcgataattggcggtaatcctttgcactttaaaccactaattaagttgtacagaagagttgcagaaaaagttggcaatgatttaacgaagatgccaattgctgcacactcttggggctggttaaatcatgataaagacaaagcaattaaggattacttctatcctacgaaattgttagttgatcaaattagtacggaaagaccgcaatggacagggatgacatatgaacaatatcttgaggcagttggagaaaatggagctatttttgttggcgatagcgagacagttgcaaataagatcatcaaagtcatggaagaacttgggttaactcgcttctatcttcatttgccaattgcctcaatgccgcatgaagatgtgatgaatgccattagaatttatggcgaagaagtagtgccgaaggtgaagacgtattttcaaaaaaagactgagcaagatcgtcttaaattaaagtggaagaattaaatagagagtaataatatagggttcaagagtctaaatgacttttgaaccctttttcacttttagagataaacctaaggaggatgcttattatgatcattcgcaccgtaacaatggatgatttaaatgaagtagtagaactggaatctgacgcatttaagatgactaaaaagcaaactgaacaagatatgattggtagaattgagaattatcctgatacttttttagttgcacaagaagatggaaaagtgattggtcatattttgggtcctgcttttaataaacgctatattgaagatgaattatattttgaaaatcatcctaatcaaaaagatgatcgctatcaaatggtcttgagtttagcggtcttgcctgaataccgcaaacaaggcgtagcgacaaaattaattgaagcaatagcgcaagagggcagaaagcaaaatcgtcaagctatatctttaacttgtttaccgaaattgattaaattttatgaaaaacgtggtttttataatgaaggcgagaccaatgatgatattccagatccaactggtgttactagcgtaaatatggtaaggactttgtaaaatgacgcaattaactgaagaaatgtatgcaatttttgatcgggatgaattttcttttaaaaaattgaaatcgcaatattctgaagatgaattagcgcaaataaaaacagattttaaagaaatttggcagacctggaaagaaataaacttaaatgtttatcaaaaattaccacaagataaatttgctaaagttcatgttgaaagttggaccaatggttggaacttacgcgatcattactgggcagcttatcgtttgaatgctttagccgataaaagtccatgcatcggcgtgatgctggataataagcagctgcaggtttatcttatgtttcagcattataagagtgaaaagcgcggcgataatcctgaacaatacaataaattattaactgatcttcctgattgggcaaaagggcggacaactaataattggtacttatgggataaaaacgaaatggagtttgctgatcatttatccttaaatgagtatttaacagatgctgaaaaacagacttcatttaataaggaagcaactcaatccagtttcctattaggaaaatttgcttttagaaagcaagatcaagttgcagatatggaaaacttcatcttagatggtattgggcagctattgccgttatatcgaaagttagcaaattaaaatacgttaaaattgtattttaaagtgttcatgctacataataaaagtaaatactgctgttattgtttaattaaagggataacaaatggatatttattcaattattggcatgatcattttagttttagttaccagcacagtaactagtatgattgttgccttaatttttgtattcttaggaattgccatgtttgttgtgcatttaattaagtgaaatctatatgtaaaagtaataatgcaaaataacaaattgatattttttgaataagtattgctgtgctatattgaaggtgttactgctccatcattggtgcaattgatcataatccttctgcaggtacagttctccttgataaaaaataaaactaaattcatcaacgttatctaataatgatataatgtctgtgttggattttttagaaaagagataaaaacaaaaatgaatacaatcgcatttaaccaacaattatcagataagttgaacgaagaacttaatccagaattgttctctaccccaggtaagggtgagattacagttgttgctaatgaaaagaaagacttacgtgagtaccgtattattactaaggataataaagtagtcgatgtagtcgatgcatatgatgcagatcatgatgcagcttatcaaaagatgatagatttcttgaagaattaccgttaataattgaattaaactaatgggctagaagcttgataatgagtttctagtctatttttttgccaatttttcctaatgaattagctagatatagtaataattttgccgttcaagttatttttttaaccacttagtaaaaagtaattgaatattaaaaaaatagcagtaatattaaacataaataagatatttttaatattttaatttgcttggagatgagacaaatgagtattacagggatttttaaggtcaataaagctaaattcattttaatttttctaatggttatcattggtacaaccgttgatgctgcttcgcaatatttgatgaccccggcctttaaccagctaaagaaaatgaatttatttggctttattatttttatttgtttggctattggctgtgatctagttagattagccttgattactagttcagattacttatacggaaagcaatcacaatcttatttgcaccaaattcgtgtaaaaattagtcgctacttttttaaaaatgaaattgcccaaactgctaaagtgcaaaatgaattggttgccaatcttgatcagctaacacagaattatttaaaaccaatcaaaaacggttttatgtacttgttgtctgtgcttttctcaattggaattttgttttcatttaactggcttttagtagtaatgacggtgattttaactgcaatttcattatttttgcctaaaacttttgaaaaaatgacttcatcggccacaataaaggttactaagaaaaatgaaaagttcttaaacactttagccaagtggatgagtagcctggatgaattacgaagatatgccagttttaatatatttagtgaatcagttaaccaaagcgcagacgaatataaaaaagcagctattcatcaaggagcaactattgctattgcagatatgatcacctttgtagttaatattgtgggacaaatgctcttgatggttttatgtgcttacttatatttgcaaggacaaattgtttttggtgcggtaattactactattcaatttagttcaactgtaatgaatggtgtttcagcatttgtaacggaatggaatttaattaaatccaccaaggatttgaataaggaaattactaatcttcaagctccagtaaaaatagctccagatcagcatcaagttaagaagattaacaggctagaagtaaaagatctggccttacaattcaaaaatggtgagtatttatcttacccagattttacagttaagcaaggtgaaaaaatcttgcttactggtgatagtggaactggcaagtcaactttatttaaattaattttaggtaaattaacgcccagccaaggtgagatcaatttttttgatcataatggtcaaaaattaaattttgatcttgatgaattaggctatattgctcaagataataccttgtttcctgacacaattgccaataatgtcacgatgttgagactgtaaaatagtttgtgtaaggatgaataattccttaaatttatttcttaaaacattagaaaaaggagttcctttctcgtatgattggtttgaacaaaaaaacacatacagaaagaagaactccttcatgaatgattttaccaaagattttgctcaagctctattcaatccagacaaaataaatgatttattgcgcaaagagctacaacaggctgttaataacttgctagaagctgagttgactgcctttctaggctatgatccctatgccagaaatggctggaatactggcaattctagaaatggtgcttatttccgcaaggttgatacccagtttggaccaattgaagtgcaagtgcctcgggatcgcaacggtcaatttcatcagcacacgctgcctgactacaagcagcactcggatatcttggaaagcatgattatcaagctttactccaagggcgtgaccaccagggaaatagccgatctaattgaaaagatgtatggcagccattacagtccagctcaggtatcaaatatttccaagcagatgattccaaaggttgaggcttaccacaaacgcaagctaagcgacaagtttttctgcgtctatttggatgcgacataccttcctttgcgccgagaaacatttgagcgtgaagcagtctatattgccattggcatcaagcctaatgggcacaaggaggtcattgactactgcattgcacctagcgagaacattgaagtctggacagatatgcttcaaaacatgaaatcccgaggcttaaagcaagttgagctttttctttctgatggtgttgttggcatgaaaacagccttggccaggacttatcctaaagctcattttcaacgctgcctggttcatgtcatgcgcaatatctgcgctaaagtacgcgtcgacgatcgtgaaaagatcatgaacgaattcaaacaggtgcatcaacagacaaacaaagaagaagccacagctgtcctgcatgacttctataccaaatggggcaaggtttacagccatgttatcagaagcttgaaagacatagaaccagatctgctggtcttttataactatcccaagcagatcagagcttcaatttattcgactaacatgattgaatcatttaacaatgtgatcaagcgcaaagctaagcctaaggcagagtttccaactgaacagtcgcttgatgcttttattggcattcaggcaatgagctacaatgaccgttatttcaatcgaattcataaaggctttggtcaggttcaggacaccttagaatcctactttgattaaataaataattaaaaaatcaatttgcgagaaagaactatttacacaaaagatttgacagtttcgctattggtgcaggctacattcaaatgtactggctgacttatatcaaagatcgtgcttgggtgaagattttacttgcgacggctttaatggggattttatatttagctgctcaagggatgatctattatatccaatttgtaattcgagtgcaggaagaagaatataataaaaaggtgcgcgctcgtttggctacacattactttagagatggtcaaaatcatcaagtaccggccgtgcaaaatcggatgactaatgatttagaaatgattagaaaaaattattttgattggtatccaattgtgccgttctatggctcaatgtttgttgcggcattggtggctctacttacaattaattggtcaatctttttgactagtgtagtgattgatattgtttcttactttgtacctaaattagtacaaaagaaaatggaacaagcaactaataatgtttctgagcaaaataagcattatctagatgttttagctaaatggttctctggcttagaagaattaagaagatattttgctggtgctaagttatttcaggtaggtgaaaaaacttcaagtaaagtagaacaggctcatgttaaacaaacggctgctcaacagcaattaattattttgaatgggatctgtaacatggtaggacaaataatcctgttgtctttgacggcttttttgatcactaagaatttagtgatttttggtgcaattatgtctgtccaaaactttgcagctaatatttcgatcggcttacaacaaacaattcaggcattaagttttatgaaatcgtcacaggatttaatgaaacaagttgatggtgatgctactgtgattgaaaaagttaaagctggccaagaagagacaccagtagcattttcaacaaaagatttggctttgcagtatcctaatggtgaaaagcttacttttcctgatattgcagttaaacctggcgagaaaatcttattaacaggagattcaggcgcaggtaagtctactttatttaaattgattttgggtgaacttaaacctagcacaggcaaaattgaatttcaaaatagtcaaggtttgacaattaagcctaatatgtcaagaataggctatattccacaagagccgaacctatttccgggtacaattaaagaaaacattacaatgttcaacaagcaacttaataatcaagtagctcaagtgcttgatgaagttaattttgcggccgatattaaaaagtttaaagcaggtgtcgatgaaaaaattgacttggataatttgaatatttccggaggacaacgacaaaagatcgtattggcaagatcgaagatccatgatagtgacattattttgattgatgaaggaactagtgcaattgatcagacagcgactatggatattttacaaaaattattaaaaagcaagaccacaattgtctttattgctcacaattttaataaacagatgcaggaaatgtttgatcgcgaaattcatttaataaaagaataaaaaatcaattagagaaaagactcccaaatattaatatttttaatttgaaccttgacaaaatgttgatttaaccagtaaattaattgcgggttattaattaggatagattaattattggagttgtgaaaattgaataaaaaatctaaagctcctcaactcaaacgaacaatgacagcaggccaaatggagatgatctctcttggcggtgctatcggtgttggtttgtttatggggtcaacctcgactattaaatggaccggtccgtcagtattattagcctacatgtttgtggggttgattttatatattgtaatgcgggcattaggtgagatgctttatatcaatccagggacaggttcatttgctgattatgcaacagaatatgtgcatcccttagccggctatttagcgatgtgggccaatgtctttgaatatattgtagtaggaatgtccgaagtagtcgcggcaactgaatatctgaagtattggtggccgaatatttcggcgctgtggtcggggatcatcattattgcctttttactactagccaatttagctagtgctaaggcttatgcatcactagaattttggtttgccatgatcaaagtaataacgattattttaatgattattttaggctttatcgttattttctttggtgtaggtaatggcggccacccaactggctttagcaatttatggtctcacggtggtttctttactggtggaataaaaggatttttcttttcaatgtcaatcattgttggttcatatgaaggaatcgagttattaggtatttctgctggagaagtagccaatccacaagaggcaatcgttaaaagtgttaagtcagttttgtttagaattctaattttctatgtcggagcaatttttgtcattgtaacgatttatccttgggataaattagacagcctaggttcaccatttgtaacgactttcgctaaagtagggattactgcggctgcttcaataattaacttcgttgttttaacggctgctctttctggtgctaactcagggatttattcttccagcagaatgttgtttaagctatctcatgaccacgaagcaccgggaatttttaagcatatttctaagcgaattgtacctgatcgtgcaattatggggatttctgctggtatttttattggttttgtcttgaacgtaattgcttcacaatttaatcattcagctagtgatttatttgtaattgtcttcagttcatctgttttaccaggaatgattccttggtttgtgattttattagctgaattaagatttagacggcataacaaagaagcgatacaagatcatccatttaaattgccgttatatccattttcaaattactttgcctttgcaatgttgataatgattgtaattttcatgtttctcaatcctgatacgagaatttcagttatcgcaggggcattagtcttgattgtggcaacaatcgtctacttagttagacacaaaaatgaatttaagaaaagtaattaaggtgattattcacctttttatttttatctaaaaacactaaatctatggtttttcattatccaacatataagatctatggtatgttagaagaaatgttttttgaaaggtgaagataatggcaattcttgaacaaccatatttggatttgttagaaaaaattatgactgaaggacatgacaaggatgatcgaactggtactggaactagatcatattttggtgcccaaatgcgttttgatttgacacagggctttccacttttaacgactaaaaaggtgccatttggtttgattaaaagtgaattgttgtggttcttgcgtggcgataccaatattcgctttttgctagagcataacaatcatatttgggatgaatgggccttcaaaaattgggttcaaagtcctgaatatcagggtcctgacatgactaattttggtttgcgtagtcaaagtgatccagaatttaatcaagtttatcaagcagaaatgaagaaatttgatcagcgcattcttgatgatcctgcttttgcccagaaatatggcaacttaggtgatgtctatggggcacaatggcgtcattgggaaaagcggacaggcggttttatcgatcaaattgctgacgtgattaagcaaattaaggaaacgccagattctcgtagaatgattgtcacggcctggaatccggaagatgtgccaactagtgctttgccaccatgccatgtcatgttccaattttatgtagtcgatggcaaaattagcgtgcagctttatcaaagaagtggtgatatgtttttaggcgtgccatttaatattgcttcatattcgctgctcttgaacatgattgcgcgtgaaaccggcttaaaagtgggtgaatttgtacatactttaggggatgcacatatttatcgcaaccactttagccaagtaaaggaattgctgagtcggacgccatatgattcacctgaattgtggcttaatcctgaaaaaaagcacattgaagactttgaaatgaaagatatcaaagtgctgaattatcagcaccatggcacgatcaaggcaccggttgcagtttaggaggtctcaatgttaagttttgtttgggctgaagatcagcagcatggtattggcatcgatggccatttgccttggcatctgccggctgacttgaagcattttaaggaaaagaccataggtcatccgatcatcatggggcgaaaaacctttgcgagtttgcctcacttgttaccagagagaaaacatattgttttaactcatcgtcaagaattaaagcaaaaatatgcgggtaatgagcaagtgaagattgtgtccacattagctgaattaaatgaatatcttcgtcaacatcagactgaagaaatctgtgcaattggtggagtttcaatctttagggcgttacttgatcaagttgatcttttagaaaaaacagagatcaaagctaattttaaaactgatacagtgatgccagcgattaactatgatgattttgaattagttagtcgcgaagagcatcatcatgatgaaaagaacaagtatgactatacttttttaacttatcatagaaaaaataaataattgttaaaaagtctcgcagagttgcgtggcttttttatttttcgctataatggatgaaagtattttcagtataggacagaaaattatgacagataaacaaataacgggattaactcaagctgaagttgatccaagaattcaaaatggacaggttaatcaagccattgatgaccagtccaaaacagctactcaaataattcgagaaaatgtctttacttattttaacttgatttttgctattttggctgtgctattggtgtttgttggtgcctggaacgatctgacttttttaccagtgattgttttaaacacgattatcggtattgtgcaggagcttcgtgctaaaaaagttttaagcaagttaaacgtgatgaatgcgacggaaattatcgcggtacgtgatgggcaagaagaaaaaattcccatcgaaaaattggttcaagatgatgtcgttcttttacaaactggtgaccagattccagctgatgcgcgggtaatctcaggtgagctgcgggttaatgaagccttgttgacaggtgaatctgatgaaatcactaagactaaagacgcagaattaatgtcaggttcttttgtagtttccggtaaggcttatgccgtcttagaaaaagtgggtaaagactcatatatttctaaattaacgatcgaagcaaaggcaatgggcagtgttgaacaatctgaaatggtgcgttcaatcaatcgtctggttaaatgggtcggcatcatcattattccggtgggaattgccctatttagtcagagtttctttttgaataatattggactcaagcgtagtatcacttccatggaagctgctttaattgggatgattccagaagggctatatttattgactacgattgccttagctctagctgctatgcgattagcgcgacaagaagtaatgctgcacgatatgaagagtgttgaaactttagcccgagtaaatgtcctttgtgtagataaaacgggaacaattaccgaaccgaagatggccgtagaaaaagctgttagtagcaagaattttactggtgatttaagtagcatcattgcggattttgctaaaaacatgccagctgataatgcgacgatgaaggcgattcaagcctattttaaagatggaaccaaaacggcggatagcattttgccttttacctcagtcaataaatattctggtgtaatttttggcaatcagacaactttaattggtgcgcctgaaatggttttgcgtgatcaatttgcgcaatatcaaactgaatttgaaaaatatgcggcagaaggctaccgggtgttgattgcggctaattatcctggcgtattaactgaagataattccgccttaaaggaaaatgtacaagttctcggttatattttattgtcgaatccaattcgtaaagaagccaagtcaacttttcaatattttaaccagcaaggtgttgatatcaaggttatttctggggataatccggtaaccgttgctcgagtagctaagcaagctggaattaatggggcagataagtatatcgatgcgcaaaccattaaagatggtgaatatgagcaggccgtgcaaaactataatgtctttggccgggttaagcctgatcaaaagcgaaagtttgtcgttgctttgcaaaatcaaggtaataccgtagccatgactggtgacggagttaacgatattttagcgatgaaaaaggcggattgctcaatcgctatggcttctggtaatagtgctgcagtgcaagcttcacaagtggttttgctcgattctaattttgctaaaatgccgttagtggtgaaccaaggcaggcaagtagttaataacattcaacgttcagccagcttgttcttggtgaaaaatattttttcattcttgatggccatcttctctttgattatgacaatcaattatccgctgcagccagcccagatcacattgatctctgcatttacaattggcttgccgtcgtttttattggccttagaaagcaaccacaagcgaattcgtggaaagtttatgccaaatgttttagctcgggcaattccagggggcttaacagattggctggcagttgcaattttagtcattgcaggggcctctatctcacttgatcatggtcaggtaggcacgacagcgactatgttgctagtcttagttggttttatggtgatgtatcatatttcggcaccaataaacaaatttagacttgctgttatgggcttatcagttatctgtattattggctcaactatcttttttccaagattgttctcattgacaatgcttaataacaaatcattatttattttggcggtcttattctgtgcggcagtgactatctttagatggttatctaaaattttggatggaatcgccgaagtgttggttgtctttgatcaaaaaggaaagaacatgacttttgtggaattcaaggaagcatatgatcgtggcaaaaataatgtgaaataagaagataatgaaaaagccagagttttgctctgacttttttactaccttaatgattttcgatatccagcagcttgtgcggcagcttcactgttgaagtaaactgcattagctgatgacatatgataattttgcccgttcattacatggtagatcttactgcgacgattgccaacgactcggtgttctgcagtggatacagtacctttgatatggtgaatggttcgtttcttggttactcgagaagtggatcgttttctagattttacatgttcagcaatagtactagacccatgtttaaccttagaagtaccggtcttgtaattaagcaacataccaggttgctcattaaaaatgtagacattaaagcgaagcccgtttttgctagttgcttcggcttccatttcaacgccgttagctaataggtcattccctttaaatattggagtaacccgatagcggacatagtttttgctcgaactacgtaaatattcagcaacctcattttcatatttaagcatatccggatcatttaattcacgcgtaccggtaatcaaattgcgtggattgttgttttgaccagtcaactgatagccgattagatggcaccgattatacaaccaaccactagcgattcgtttattatgccagccggtcggattccaagttaaagccgcacgctgactatgtggcattaatcttttatttagtaaagcattagcagcatgagctcggttcaaataatctaattggctatatttttgccatggaccttttttcttgctcaatgtactcttagaaaactgcggctgatcatgatcaacggtcacaatttgtttgttgtggtatttcaaattgactaatgctttatctgaaacagcatagacggtttgattgttgcatgggacattagtattagcaaaagaaatgaatccaattgctgcagctaatgagagagcaaaacttcgaaagcgatttttcttcattttttctccttagcaaaaataaattatttaactatatcctaattatacaatgaaatcgcttttatctaataaaaattaaaaaagatgttgactagattaaaagaagatgataacttatttataacaaatcaagaaaacaacatcttgaaggactgagtaactagaacttctattgataaagagagccagcgtggtggtgaaagttggcaaataggagctagtgaatatgggtttggaacgatgaccggtggtgatatttagctatcggcggggctgcatccgttaacagtgcaggctattttttgatagccagtgaggttgattacgtaagtgatcagcgaattaaaggtggtaacgcgagcactcgtcctttggggatgggtgcttttttatttttatcaaagtaggagtgtattttatgagaaaacggagaagaagaaataccattatttggacgatcattgggatactgatcgtgattgcaggttggtttagttttggtccaggaattcccagtcaaaatcagacaaaaactgttacagtcggaatcgttggggaaagtaaagccgaagccgcaatttggaagtcaattgctaaaacggctaaggaaaaatatggtattaccttaaaaactaagaactttacggattacaaccaacctaacaaggccttgaagtcgggcgatattgacatgaatgcttttcaacactatgccttcttaaaggattggaataaggcaaatcacggtggcgttgtcgccattggtagaacctacatcgcaccgatcagactttattcacgcaagtatcataaattgagtgacttacctgatggtgccacgattgcagtgcctaacgatgctactaacgaatcaagagcactgtttgttttgaaaaatgccggcttaattaagttgaagaagggtaagaccttagttactgtagctgatatcaccagcaatccaaataactacaagattaaggaaatcggtgctgaacaaactggtcgagtattgaattcagttgacgcttctgtagtaaataatgattatgctggtcctgctggcttgactgataagcaaacgatttacattgaaccaattaacaaagattcaaaacaatggattaacattctttgtgtcaaacaaggcaaacaaaaggacaagctttaccaagatgtcgtcaaggcttaccaaactgcagaaactaagaagctaactaaggaatactatggcaatacgcaaattgcagcctgggacgttaagttgaagtaaggaggatcaaaaatgagtattgttgaattgaaaaatgtagaagtggccttccctcagaagaagggcgaacgagttaaagcagtgaataatgtttctctttccattgaaaaaggcgacatttatggaattgtaggcttctctggtgccggcaagtcaactttagttagaacggtcaatcttttacaaaaaccaactgccggtagtattaccgttgatggcactgaatttcttaaagatggcaagcaggtgatttctaataaagaattgcaattaaagcgcagaaacatcggaatgatcttccagggttttaacctattaaatgaaacgactgtattagaaaatgtagcctttgccttaaaacatgaaaagttgagtgatgaggaattagaaaaacggtcattggaattgcttgatctggttgacttaaaagataaggctgacttttatccagctgaattatctggtgggcaacaacaaagagtagcgattgctagagctttggctaataatccagatattttgatctctgatgaagcaaccagtgccttggacccacaaaatacgcaacaaatcttggacctgcttaagcgtttgaacaaaaagttccacttaacggtcatcttaatcacgcacgaaatggatgctgttaagaagattgccactaaggtcgccgtcatggaacacggcaatgtgattgaagacggcagtttgcgagatgtcttcttacatcctaagcaggatttaaccaagaagtttgttggtggatcacttgaagcgatttctactttgaattcattggcgcttgataagcttggcaaaaatgaagcaatttatcaattagtttacagcgtagctaatgtgactaaatcaatcattattgaattgtataagcaaattggcgtagaagtttcaatgctttatgggaatgttgaacttttgaatgaagagccaattggtactttggtggtattggtgaaaggcgatccagctaagcaaaagcaaacacaagaatttttggctaagcaaaatgtgacatttacacgtttagatgaaaaggggaatgtatatcatgattagtttcttaagtaaatatttacccaatgttgttcaacttggctggggcggagacgctggctggggcactagtatttttcagaccttatttatgactttttggtcagctatctttggtggcattcttggtattatctttggcgtgattttagttttaactaaggatggcgggattcggcccaataaattctggtacaatttctcagataagctagtttcaatcttcagagcgattccgttcattatcctgcttgcctttgttgcaccagttactcaaaaaattgtaggtacacagatcggaatgaaggcagccttagtaccattaactttaggcgtatttccattttatgctcgtcaggtgcaagttgctttagaaagtgttgacccaggtaaggttgaagccgcagaaagtttgggctcaactgcgcgtgatattgtctttgatgtttatttaagagaatctcgctcagaactgattcgtgtttcgacggtgacgattatttctttgattggtttgactgcaatggctggtgctgtaggtgccggtggtttaggtaataccgctatttcatacggttataaccgattcaataatgatgttactttagtagctactgtattagtaattattttgatttttatcgttcaaatcattggtgacttctttgctaaaagaatgaatcaccagtctagataaaactatgatccaggaaaaatcctgggtctttttttggaatgaaattgaaaaagaaagcctttacaggtattataaatggtgattgataattaacgcaaaccttatagagcttaataaggaggaatataatatgagcgaagaagaataccgtgttgaaagtgacactattggtccagttaagatccctaaaaatgctttatggggccctcaaactgaaagaagccgcaataacttcccaagtggtgaattgatgccattgcaaattattcgagcatttttacacttaaagaaggcagctgcagaaagtaacgttgaagttggcgatgaaccaaaagaaaaaggcgaagcaattgaagatgcaattgatcatttgctagctttaagcgatactgacttgcgtaaggacttcccacttcatgttttgcaaaccggttcaggtactcaaagcaacatgaacgttaacgaagttgtagctaacttggctaataaattgcacccaggtttagatattttgcctaatgatgatgttaaccgtggtcaatcatctaatgatacttatccaactgcaatgaatattgttgccgttgaagcattggacaagttggaaccagcaattcaacacttaattgatgaattagttgttaaagaaaagaaatattggaagactgttaaagttggtcgaacccacttacaagacgcaacgcctttgacttttggtcaagaattatctggctatatttctgctcttaaacatgacttatcatatattcgtgaattgaagccaactctctacgaattagctattggtgggactgctgtagggactggcttgaatgcagcaccgggaatgaccgaaaaaattgctggtaaattatcagaagtctatggtcataaatttgaagttaaaactaataaattctggggcttagctcaccattcaggtcttgatgtagttcatggtgcccttaaaacattggctgctgatatgtttaagattgcgcaagatattcgtttacttgcttcaggtccgagagcgggctaccatgaattaaatattccagcaaatgagccaggttcaagtattatgccaggtaaagttaacccaactcaggcagaggctgtaacaatggctgctgctaaagtatttggtaatgacaccaccattacctttgcttctagtcaaggtaattttgaaatgaacgtcttcaagacagtcatcattgcatcattcttagatagttgtgatattttaactggtacaattactggttttgctgataaaatgattcatggcttaacggttaatgaagaaagaatggatgaattacttgagaattcattaatgaccgttactgccttgtcgccacatattggctatcatgctgctgctaagattgcgcaaactgctgataaagaaggcactactttaagagaagctgctttgaagagtggtaaagttactgaagaacaatatgatgaatggatggactatatgcaaatgactaatgttgataagtctactccagaagaatagggaaagtaagaaatgccaaatacaaaagaattaaagaataaatatgatgctatcgttgttggctcaggcggagcaggtctgactgctgcacttcaagctcatgaactaggtctaaatgttgttgtgcttgaaaaaaatgagaaaactggtggtaacactagtcgtgcttcaagtggaatgaacgcttctgaatctttggttcagcttgacgaagggatcattgataataaccgtgacttctatgaagaaactttaaaaggtggaggtttattaaatgaccgtgccatgttgaagtactttgttaaccactctgctttagctatttcatggttgatgaaatatggtattcgtttaactgatttgaccattacaggagggatgagtaagaaacgtgctcaccgtcctgcttcaatggaaccagttggattttatctaacttcacgaatgacaacacaggtgaaaaaagcgggtattgacatctttactggtgctaaagttaccaagttgttgcaagatgctaagaagcgcgttaatggtgttgaagttgagacaccagatggcattaaaacagttaaagctaaggtggttcttttagctactggtggctttggtgcttccaaggatatcattaagaagtatcgtccagacttagttgactataagactactaatcagccaggggctacaggcgatggactgaagcttgctgaagcacttgatgctcaactaatgcaaatgaacttcattcaggttcacccaactgcagatactgataatccgcatgtttatttaattggtgaaggtctgcgcggtgaaggtgctatcttagttaacaagaatggtcaacgttttgttaatgaattaagtacacgaaagattgtttctagtgcaattactaatttgcatgaagatggggcatacttgatttttgactcaggtgtacgggctcattttgctgcagttgagttttatgaccagattggtttagtagaacatggtactgatttggctgatttagctaaaaaaattggcgtaaatggtgccaacttagaaaagaccattgccgcttggaataagtccgttgcaactggtaaggataaagaatttggcagaacgactgggatggatcgtgaactggatcgtggtccatactttgcaattcatgttcatccagcaattcactatactatgggtggtattcatattaatactgaaactcaagtacttgatactaatggtaatgtaattgatggattatttgcagctggtgaagtatctggcggacttcatggaaataatcgaattggtggtaactcaattgccgaaacagttatttttggtcgtcaagcaggtattcagatggctaaatatgttcgtgaaagtaaataatataagaaagattatgtaaagagagcggttggttaactgctctttttcgatagaaataataacactggcgagattttgatgggatattataatttataattatggaataaatcgtgtctaatgaaagcgcttagtgtataattaatcatgtagataaaaaacagtttataaacatttgaaaggactaatttaacttatgagtagaaaagtatttcttgttggtgatggtgctgttggttcaacttttgcaaatgacttattgcaaaatacaattgttgatgaattagcaatttttgatgtagctaaggatcgtcctgttggtgattcaatggaccttgaagatattacgccatttatgggtcaaaccaatattcatcctgcagccgattatagtgatgctaaagatgctgacgtttgtgtgatcactgctggtgttcctcgtaagccaggtgaaactagacttgacttggttaacaagaacgttaagattttggaaagtattgttaagccagtagttgaatcaggatttaatggtgtctttgttgtttccgcaaacccagttgacattttgacgactttgacccaaaagttgtctggtttccctaagaaccgtgtaattggtactggtacttcacttgattcaatgcgtcttcgtgttgaactttcaaagcgtttgaatgtcccagttgctaaggttaactcaatggttcttggtgaacacggtgatactagttttgaaaactttgatgaatcaacagttgctggtaaggcactccgtgattactcagaaatcaacgatgatgttctagcagaaattgagaccgatgtgcgtaagaaaggtggcaagatcattgccaacaaaggtgctacattctacggtgttgcaatgatgcttactcaaattgtctcagctattttggacaatcgtgcaatttgtttgccactttcagctccgattaatggtgaatacggtattaagcatgatctttacttaggtaccccaaccgttattaacggtgaagggatcgaaaaggtaattgaaactaagctttccgatactgagcatgctaagatgattaactcagcagacaagatgcaagaagttttgtcaggtataaacctttaattgatcattaattttattaaaagccctagttgtcaaaaactaggactttttcttaatgacaaaaaagctagaaaatagtattatataagaaaagattaataaaaaattaaaagataagaattaacgaggtatatcatgacagttatttcacaacaagaaattgaaggcttttctgaaagctttaattctaatcctgagaataaagtagcttctcgtgctgctcgtcgtagtggtttgcttgaagcttcatttaatgaccgcgtatcagaacgacttaaccatgtcttttcaactgaacttgatattggcggtgtaactgatcagaagcattctggtcgttgctgggaattcactactttgaatgttttgcgccactactttggcaaggaaaacaaggtcaaggattttacgttctcacaagcttataatttcttctgggacaagattgaacgtgctaacgctttttacaatgcaattattcgtttggcagataaacctttaactgatcgtcatgttcaagcatggcttgagtttgccggtgaagatggtggcctttggaccatggccattaatttagttaaaaagtatggcgtggtaccttcatatgcaatgccagaaagctttaatactaataatactactgctttagccgaaaacttagctcgtaaggagagaaaagacgctcttgttttgcgtaaattagttaatgaaggcaagagggatgaagcagaaaagaccaagaaggaattcttgaacgaaatttatcgcatggtatcagttgccttgggtgaaccaccaaagaaatttgatttggaataccgtgatgatgataagaagtaccatttggagcgtgatttgactccacaagcatttgttcaaaaatactttaaggacttcaacttcgatgattatgttgctttgtccaacattcctaaccatgaatataacaaggtttaccacttgccactttatgacaatgtggctggcggcgatcaagtcaaatacttgaatgtgccaattgaatacttagctcaagctgcagtagctcaacttaagtcaggtgaagcagttagctttggtaacgatgtcttgaagcaaatggaaagaaaaactggctttttggatactgaattgtacaagactgaccaattatttgacgttgatacgcaaatgagcaaggctgatcgtttgaatactggtgagggctttgctactcacgatatgactttagtcggtgttgatgaagacaacggtcatatccgtaagtggaaggttgaaaactcatggggcgacaagtttggtcacaagggcttctacgaaatgagtcaagcttggtttgaacaatatgtttacgatgtgattgtgaagaaggaatttttgccaaaggaattgcaagagttagttgatcaaccggctgttgacgtaatgccttgggaaaactttggtgaataagatcaaaataacaaagatcaagtaaagtgtctgggaaaaaactaacccttagatactgaaagacgatcaatccaactcttaatttgagttgcttgaccgtctttttctgtctatttttatttttgaacaaagaaaattggtcttttgaccatcttctgttccaatatttgcttaaattcatcatcatgaaggctattcctatatctgtttcaaccttctttttgcctctgaaatgagttcggcgcatgccaaagacgttcttcaaatgtccaaaaatcggctccacatcatatttcctcatgctgtagatgtgtctgccttcaggactttggagaactgctttggctttttcttttaggtattgccagttaggattatagcgaacctgacgttggcgtccgctcttagtcttggctaagcgttctaattctggcgttagttgaaattcatctgcttcatagaccttaaaatcacgaacctgaccagtcgatcgatctttacgttgactataatatttgaagttgaatctgacgccattttgatcaaggtaataatcatctttttcatcatagaaccagttagccagcttagtcggatcgttgcgatgctttctggtcttttccttttcgtacatggtataaggaatatagtacttcttgtctgaatactcttcttctaacattgaataattatattcgctgccataaccagcatcagcgacaatcttgtcaaacttgtctagtgtcgtcatctgctttaaaaatggttcgaaagttctgaaatcagttggattagggtataaagcaaagtcaaccacatattgatcagtggtggcagcttgaatattgtagcctggcttgagctggccgttcttcatgtgatcttccttcatatgcatgaaagtcgcgtcatgatctgtcttagaatagctgttacgccctgcaaagatttctttcgcctcttcatatttcttcattcgaggaacatagtcttttcttagtttatgaagcagctttttaagaccgcgtcttcttgcttttctaggcgaaccgccagggattgctttgggttcttgctcaatttcttcggtcagcttttcaatctcggcttccgtttcttgtgctagctctgccaaaccttgactggtctggactttctcttttgccattgctttgacgacttctttggcaatcaattcatcataaagctcaaccgcttgacctttgagcttgtcatgaaatttttcaactgccttgcgccaaacaaaagtatagcgattggcgtcagcttcgattttagtgccatcaataaagatcgctccttcattgataaggccctcggcttctaacaaattggtaaagtagaggaagcttttcttaaccagctcattggcatgcttgctggatctaaagttattgatagtatggtaagaaatctgttggtgttcagccaaagccatcatcggcacgttttcttccagcattaattcgatttttctgcctgaaaatactcttctggaataagcaaaaagcaagattttaagcatcatcgctggatgataagctggacgaccggttttagcagtattacccaataagacatcttctggaattgaatcgacaaaccagctaatggtattagccaaatgattatgaggaatagcgaagtctaagttgagtgttaaagctgtttgacctatggtataattttgatacattaagattgccttctttctttttgttttgtggtgattcaataatatcaaggaaggcacttaaagtatagaaaaagaacgatgaaatccattaggaaatcatcgttcttttttcctgtctgagaattagttttttcccagacactttttttgcataattatttgagtttaaataattcaaaaaataagtaaaaaatcaaaataattcaaaatttgtaaccgcttaatctgttgataagtgtataatactaattgtgagttgtgatgagttttagtttttataaaaaggcttgtttaacaataacaagatagattagggagcataaagaggggagagctactctatgcctgtaggaaaaagaatttatttaaagaggcaaatgcctgatccaaaagttgtagctggttttaaaaagatcccagcttctaataccgcggattgcatggaacgaaattgtgctatgaatcctagaattaagttaatgtcgaatcctgatgaggaaatggttggtccagcatttacggttcacaccagggcgggtgacaacttagcaatttatgcggctttaaagtattgccagccaggcgatgtgattgtcatcgacgacgagggtgataacactagatctttgattggtgaggtaatgatgtcttacttacgcgatcaaaagaaaattgcaggtattgtaattggtggcccaattcgtgatattgataatttaagaaattggaaactgccgatttatgcaaccagtactaccccaggtggaccatataaagaaggacctggtgaaataaatgtacctgttgcttgtgggaatgttagtgttaacccaggtgatgtgattttaggggatgctgatggagtaatttgtattccacgtaaagatgctcctgagattttgcctaaggcacaagcttttcatgagcaggatgaggctaaagcaattgcctttagcaaaggagaagttgatttaagttgggtagataaaagcttagcagataaaggctttgacatcattgatgatgtgtatcgtccatagagaataggggattcttatgaaaactttagaaaaagtgaattataaaggctttatttggcctttgatcgttggaattgtattgtggtgtattactccatggcgcccaagtggcctttcggttcaggcatggcaaatgtttgccgttttcgttgccacaattgtagggtgtattacaaaacctttgccaattggtggtacaaccttagctggcttggtagtaactgttttagttggcttagcaccaatgaaggacgttacaaatgcaaaaggtatggtagttaatcaaggcgtgcttagttcatttggtaactctgctgcatggttaatcgctatggccttcattatggctcatggtattagtaaaacaggtctaggtaaccgtattgcctatattatgattcaaaaatttggtaagaagtcattgggtattggttatgcgattactggattggaattaattctcggtgccttaattccatcgaactcagctcgtacgggtggggtcgtttggccagttgttgaatctgtttcaaaagaaggctacgattctaagccagatgatgcttctcgtaaaaagattggtgcctacattgactttactgcctttcatgccaatattttatcaacggctttgtttattaccggtgctgctcctaacatggtggctcaacaattagccgcacaaaagggctatcaaatgtcttgggcaggttggtttttcactgcaatcgtacctgttgctgtattggcagtaatcattccatttgttatttacaagatgtacccacctgagattaaagaaactccagatgctaagaaatgggctgatgaaaaattagcaaaaatgggaccaatgtcaactccagaaaaaattatgatgtcagtcttcattctttcaattgttttatgggttttgtctagtttctttaagatcccacaattagatgcgacttttgttgccttcctggctgtaactattttgatgattaccggtgtgttaacaatgcaggatgctctgaaagaaactggtgcttggaatatcttgatttggctttctatcctgatgttcatggctggtaagctgatttcatacggatttattgattggttctccaaattagttcaaaatagtcttcatggtgttagctggggctttgtattggcaattctagttttgcttttgttctacacccactacttctttgcaagtggaactgcacatatgactgctctttatttgccattcttgtctgttgcggttgcaactggtgctcctttaggcctttccgcaatgcttttagcctttactggtgcaatcaacgcatcaaccactcactatgctaatggtcctgccacaattttggctactactggctatgttaaacaaggtgaatggtggaagatgaattttgtccttggattaatctatatgattatttttggaactgtcggagttctttggatgaagattattggtttatggtaaaaaaaagcaatctggaatcaccaggttgctttttttgcgtcataatagaattgagtaatcaaaatgaaagaagattaaagatgaaatttaaaactaatgacgatgtaattttgcattataccgatacgggggatgaagataagcctgctttgattgggatcccaggtatagggggatcttgtcaaatgtggcaagatttaattgccttatttaaaaatgattatcgttttattatgcttgatccacgcaatcaaggacagtccgaacgaacctatcgtggacagcggattagtcgtcatgcagttgacttagaggagctattagttaagctcaatttgcatgatgtagtagctattggaaattctatgggggccgccaatatttgggcatatttgtcaatttatggcaaaggtagactaaaggcaatggttgatttagaccagtcaccaaagatgattgcggataagagctggaagtatggctttaaagacctaacttgggataattatcctgacatgcttaaatttgattttggcaaggctttttaccatcacattgatgaaaaaatgtttttggctgctaaaaaggaatatcaagaattcccatatgatccagccgaaaactataactgtttagttgaacatgcggagcaagattggcgtgacatgattttggatacgccggttcccatgctggtaattgctgggggaaaatcgccattttttaatccagaatttacccaagcgataaaaatgctgaatcaagatgttcaaacggcgattgtaccggaatgtgggcatttgcctcaggctgagcaaccagaaaaaacgcatgagattattgctgaatttttgaaaaatttaaaaaattaatagataaattgaaataatcaaactaagagagtaaactatatttgtgaaaacgattaccgaaatagcaaggtggcatatttatggataaagtcgttgatttgtttttaaacgacgctacaactaggcaaaaatgggaaaacttgttggaatcattggggttaaatgattttagtgaacgcgaagttaacgtgattgatcatactattgggctagaagatgaggaaggcaatttagttggtactggtagtgtggctggtaatgtcttaaagtatatcggagtcaagaatgatgccgatacgcagggggctcgctttaataaagtggttacagccttaacgcaatatttgactaatgatggaattttccattcctttgtctttactaaagcaaagtatgcaactagctttgagcacttgcacttcaatttgttagccaagacggatcaggcagcctttttagaaaatggaacgcctgatgtgaaggaatttgtggctgaagtgcccgaaatagcagatcaagagcataagaaggtcgctgcaatagtcatgaatgcaaatccgtttaccttgggtcatcagcatttgattaagatggctagtgaagaaaacgatttggtttatgtctttgttgtggctaatgatgtttctttgtttagctttgatgagcgcttcaaattggtgcaagaaggtactaaggagtttagtaatgtgaaagtaatctctggcggagactacatggtttcaccagctacttttccagcatacttcttaaaatcacctgacgatttaattgctgtacaaacggtgatagacgcagctgtctttaagaatcaaattgcaccaggactgaacattacccgtcgttatattggtaaagaaccaatttcaagaacgactcacttttataatgttagcctagcgcatgagcttggtcctgagattgaagtaatcgtaattgatcgcttggaaaaagacggtcaaattgttactgccactaaagttagacagctgatcaaggatggcaatttaaaagagatcaataaattcgtgccggaaacgacttatgaatttattaagcaaaacatgcagaaattgcagtctaaaattgagaaaggaatgaatattaatggaaattaaaaccacagcagttgcgggaacacttgagagttcagatatccaaatcatgatttcaaagggttctaacggcattgagattgaccttgaatcagaagtaaaaaaggcctatggagatcagattgaaaaggtgattactgacaccttaaaagcttatggcttagaaaatgccaaggttaaagcaaccgataagggagcactggattgtgtaattaaggctcgtactttagcagctgcacaacgtgcaaccgaaacttcagacaagccagatttggaggtgctctaaatgacatacgttaagaatcgtttgcgtagaaccatgatgtttgtacctggtaataatccagctatgattaaggatgctggcatttatggtgcagattcgattatgcttgatttggaagactcagtttcattaacggaaaaagatgctgccagaatgttggtctatgaggcaattaagacagtcgatttcggtggcagtgaaattgtagttcgtgttaatggtcaagacacgccattttacgatgaagatgttaaggcaatggtaaaagccggcgttgacgttattcgcttgcctaaaactgaatcagctgcaatgattcaaaaattggtaaaggatatcgaacattgggaagatgaatttgacattgaaaatggttctattggcgtgatggctgccatcgaatcagccaagggtgtcttaaatgccccaaaaattgcaaccgcaacgcctttaatgatgggcttggcggtatctggcgaagactatactgcagatatgcatactcatcgttatccagatggtcgcgaattggaatttgcgcgtaacatggttttacaagcagctcgggccgcagacgtatatgcctttgatacagtgttctcaaatatgaaggatactgaaggcttctatcgtgaaactaactatatccatgaactagggtatgatggcaagagtttggttaacccacgtcaaattcaaatggttaataaggtctttaatccaactaaagaagagattgagcaagctaagaatgttgaaaatgccattcgtgaagccaaagctaagggctcaggcgttatttcacttaatggtaagatgatcgataagccagttgtagaaaaggctaccagggttttggaaacagcgaaagcttctaacttgattgataaagaaggtaactacattggagaataaagtaaaacgcgaattaccagatgatttaatgaaaaaaatgaatttgaaaccatttgaaactactgaaattggtcatcctgaagttaagcgggttgctccaaaggtaagagttactactggacaaaataagattattgattcacttgatgaggtaatcaagaataacctgaaagatggtatgactatttcattccaccaccattttagaaatggggattatgtttttaacttggtaatggacaagattattagtatgggttaccaggatttaaccttggctccaagttcacttactggtgttatgaatgataaagttatcggagcgattaaaaagggagtaatcactaatattacttcttcgggtatgcgcggttcactaggtgattttgtttcacatggcggcttgaagaatcctgtaattttccgctcacatggtaatcgtgctcgttcaattgaagaaggcgagattaaggttgatgttgccttcttgggtgtgccagtatctgatcccgcaggtaatgctaacggtcaagatggggatgctgtcttcggctcattgggctatgccctaatggatgctcgctatgctaataaggttgttttattaactgataatattgttgattatccaaatacgcctgcgtcaattcagcaagatcaagtggattatgtggttaaaattgataaagtcggagatccagacaagattggttctggtgccactcgctttcccaaggatcctaaggaactcaagattgctcaaatggttaaccaggtaatcattaactctccatattacaagcaagggtttagcttccaaactggttctggtggtgctgcattagctgtcaccaggtacttacgtcaaagtatgattgatgatggcattactgcatcatttgctttgggtggtattactaaacctaccactgacttacttgaagaaggtctagtcagaaaagttatggatgtgcaggactttgataagggtgctgcccaatcaatggctaacaataaaaatcaacaagaaattgatgcttcttggtatgctgatcctcataataagggtgcagtggttaacaacttggatgtttcaatcttgtcagctttacaaatcgatactgacttcaatgttaatgttatgactggctcagatggtgtcattcgtggagccgtcggtggtcaccaagattccgcagctggtgccaagatgacgattattacagctcctcttgttcggggacgtaatgcgactgttgttccaagagtagaaactattgttactccaggttcatcaattgatgttttagtaactgaaagaggaattgccattaatccagctcgccaggatttagtggatgcctttagtaaggtgccaggacttaagatcttggatattaatgaattgcaaaaaatggctgaaaaacaagttggtgtaccaaagccacttgaatatactgatcgtacggttgccttagttgagtatcgtgatggtactatcattgataccattaaggaagttagggattagttcaaaacgaaatgtatgaataagtaatcacaaaggtgtcacgaaagtggcatctttttgtttttattaaaatgttaagttgtatttttgcaagaaacgttttttaattatttgtgcaaatattttattttcaagcataaatatttgcaaattctaactacgatgcagtagtaaagtcacatcgcaatatcggtcaactaagaagaaccagtgtaggtgaaatatctgcattggttctttgcgtaaaaaaacacctcgttttaagaacgaggtgcgcgtatacatatatttttctgagtaattttattatgacacaaattagattgattttcacttatttagactcattattttgttttgatgaatatttttgttaaagtgaactaatgctaatgattttttgaggggagataaatatggaaagttggttatttctagcattggtgctagttgtagcgttattgggtaaaaacatgtcattaattattgcaacgggagtggtaatggtgtttaaattattaccgtttactagtaaatggctgcctactattcaagcaaaggggattaattggggcgtaactattatttcggttgcaattctagttcctattgcgacaggacagattggctttaaggatctgattaaaacttttaagtcgccagctggatggattgccattttagcgggaattgctgtagctatcttgtcacgttatggtgttgatcaattagcagcggtgccacaggtgacggttgcattagttttaggtactattattggagtagtggttttcaagggtgtagctgcaggtcctgtgattgctagtggaatgacatacttagtaattacgctgtttaacctacatttttgaggtataattatgaaaagtgaggcgatttaatgattattgtacatgaaaatacgcaagagcgattagatgactatcttgaacaccgtttgcataattatgaaataatcacgccgccgattcctaagaaacctgagattgtcactcaagatgatcataaacagaaaaatcgaaaaccaaaaagggaccattaggtccttttaattttggtctaaataaatggattataaaatctaccatgatcaagttgccagagaccaaccacaattaataccaaaatcacggctgcgatcattacaagataatcagcttttttaaatgattgggtgacataccaggtccgttttttctttgagccaaagcggcgtaattgcatggctgttgaaattgtatcgattcgatccaaactggagaagataagaggcatcacgatattcaatgtccccttaattcgtttgcctaaactagcctttttggatagttcattgccacgtgcttgttgggcagctgagatatcccaataagaattttggatatctgggatgtagcgtagagctagagaaacagcataggaaattttgtaactaatgccgattttatttaatgaagcagcaaattgactaggattagtagttaatagaaacagcaatacgattggaattgagcagacatattttaagaaaagattgaataagtagaatacctcttgcaatgttaatgtgaagtagccggcatggatcaagatgcttttagaatgataaatattttcaccatagcttggctgaaagatgaaaacaaaaatcagatttagcaacatgaaaactacaataaatttcacgataaaagaaatctgactccacttaatttttgcctctttaaacaagaaaattgataaaatacagatagcaattaagaatctggtatcataagttaccatacaagcaaccgagactaggagcataaaaactaacttagtggttgcgtttaattgataaataaaagaatcaccaggttgataacctaaaacttggctttcattatgcatgtttttcatccctttctgcatcaatataggcgcggacaaagctatctggattttctaattgatatttgatagcgagattatataaggaggttcgcttcaaagcagcctttttaattaaagctttttcagttaataacttgattggatctgtgtcagcaattagtgttccatcagcaaaagccagggatctgttagtgtattccatcagcaagtacatatcgtgagtgataatcataattgttttgccttgatcattaagctgttttaaaaagttcatgatctcagtataagtttgccaatcttgccctgcagttggttcatcaagaattaataactcaggattaagcactaaaattgcagcaattgtgactcgctttttctgaccgaaggataaagcagagattggccagttgcggtacggataaagaccacaaactttcaaagtatcatagaccttagtgcgaatagtctgctcatcataaccacgtagacgcaagcctagagctacttcgtcaaaaatcattttttgggaaatcatctggttaggatcttgcatgacataaccaatcttatcggaacgctctttgattgaaaactgcttaaggttatcaccatcaaataaaataagtccctcattgtcgataaagccacaaataattcgacaaagggtggtttttcccgcaccattttgaccaactattgaaacaaaatcgccttgattgattgtcgctgtaacgtcatgtaaaggatgaatctgcaatttactataacggtggccgacgcctttgagttctaatagaggatgagtctcttctttttcaccacttagggtaatgttgttttgccattcttgcaactgcttagcaatttcaggatcttggggcaaagcagcgactgaagttaggtcgggaatacgcgtaaggtcgacgttagctttttttaaggcatttaaataaagaggactacgaacaccaacgtcttctaaacaattctcatgtaatagatcatttggcttcttatcagctacaatttcaccatcattaattaggataatgcgatctataggctgactccaaacttcttctagacggtgttcaataatgattactgtagcatttaattctttttgaatgcgatcaattaaagccatcgttttcattcctgaagctggggctaaattagcaagtggctcgtcaaaaagtaaaattggtgattcatcaaccatgacaccagctagagcaacaatttgtttttgaccaccagatagattttgtggcgcctgctttaataaatgctcaatccctaattcatcagcccagcgatgaacaacttgtttcatataattttgtggttggcagtcgttttccaaagcaaaagcaatgtcttcaccaacagttaagccgataaattgactgtcagtatcttgtaggatagttgaggtggtgaaagaaagatcaaataggttagtgtctttaatattattgccgttaatagtgcattcaccggtgatctcaccagtatctagattaggaattaggccgttaatacagcggccaatggtcgatttacctgaacctgatggtccagcaattaacaatttttcaccttgtttgatagttagattaatctgttttagtgttggctcggcctgactgtcatacttaaatgaaaaatctttgaattcaataattgttttaggcattgtttaatcctccttgcgcaagctgccttttttaatcttggttccagcataagctttaagtaggagcgtgccaatgaccataattgtaataccattagaaagcgtagccgaaattccttggacaaaaactttgttagcaggttcgctatagatgataatgtcaccgattggtgcaactacaatccaggcgagaatattggcaataatttgaatgatattaaaaaagattatttgtttaataccaaaaataccattttttaagtctaagcgtttggccgctaaaccgatgatccagcctaaaacagcagtagctaatacccagctccaccaagtctgcccgtacataatgaaatcggacaaagcatgtccaataaagccgacaataaaaccgaccttagcgccatagattgacgcaaaaagagccaaaaaaggaaagactaattcaatatttgtgttaggaataggcgtaggaatcgatgtgaaacgtgctaaaataacatagattgccgatccaattccgatcgctacaacatttttaactgataaacccttagtatgcatatttttctccaaaatttagtatatttacaaggtataattagtaagcggtaacagtcaagctgattgggagatccaatctatttaataaatttgtagaagaattgctaagagggtatccttatattaaagaaaagaatttataaattagaggtaaaaaatgaagcaggatgaattaaagaaaattaaccatgaaataggttcgtatgttgctaaggtaaccaagacaatttgggttgacgataggacattgcagattgccacaatgatgattgattcttatggcgataccgtatatgtttgggttgaggaagccgatgatcattgccgcgttagtgatggcggacgaattctatttaagctagatcctaatgaggaagataaagagttatatgaaactgcggaagatattgcgctagggtcaggttatgaatttgatgaaaaacactgtgaaatttttgttgatgttgatcgcaagaatgtggctcaggcggcaatgaagctggcacaattacaagtagcaatttcatatttaggctaaaaaaagacatccctaagttttctttgattagggatgtcctttatttttaagtcatttcgaaaaactttagacatttgccatccttcctaggttcacatcttgtggctttttaccattgaggtcaaaatttgcaattgcttgtgctaaagccatcattgatacaacatctggaatacattcatcaattctaaactccataatgctcacctcccagtcattgtaaatccaactttagtaattgttaaccagtacataacaaattttagcatagaaaaagcagccaatttttggctgctttttctattttttattgctatgttgcataaagataaagaaggcagaaataatattaacaatcacagcaggtaaggctagagcagcggtaaagccatatagtgcattaccaattactcctaaaattggcccaattggtgagatattcatgttatgcgattgcactactgcaacggcattaaggatcacgccgaaccaggcaaataagtaaaatattaaagctattctagcagtgaagtcagctccaaggatggcaaaccaagagctaatgaataacacacaattgatcaggttcagtgcaccaatccataaatcatatttagattttttcattttttctcctcattataaatagtctatctctgtattactttagcgaattaatcgatattttgcaaaacgcgttgggcaattgcatcattagttactagatgagtaatgataccgctacgtaaggcgccaaggagtgcctcagatttaaagcgattgcggacgacacaaaaacgaattggcgttttcataatgtcattcatgctgataccacaaatgtgttgttcgaagtcagggaaaaattcacctttaatattatatggtcgtcccatgatcattccagctacatcgcagtcaggaatgtctttaaatagttcaggtccataattttctttcaaaaattgattagcttgaaatgattggaaagtactaagaccagtgaaaagcatgtctaagtgatgataacaattttcaattactttaaaataaggctcatgtttcaaggcaggcatgatctttggatttagtatataaagtggggttggcagacttagactatgggaatgcaatttttctgctgcatcttgggccaatggattcttcctgcggttagaattaattggttgaccaagtaattgaataaagtaaagttgctctaagtcctgctcaaaaaagtcgttgatcacgccatgcattgttgcaccccaactaataccagcgatttttgcttgctttagataggtttcaatttgtttagcagcgaagttaactacggcttcactattttcatcgcggttgccggtagtttcgacaataaaagcttcttttaatctgaatcttttctgaaattctctctctagtacctgattgcgtttgattccacgcgagattttaattttaacaattccacggttacgcgcgtcttctagtgctttagcgattaaatatcgcgataaatcatatttttgtgagatatcagcaatattaagctgactaaggtaaaagtcatgagcaatgttagcaagttgttcatcagttaattgagccactttaaatcatcctttatttcaaaataacttatatgtctattataaatttaaaataataaaaaggagcagcaaattttaaaatatcaaaaattatgatgaagttcctgtggtagaatataatggttataattatgcgaactatgtgagggaaagtaataatagcatgagtgaaattgatcgagaacatcatttatcagaaaaacatcatatgaagattctgtgggaggaatttttcaagagcgataataatacgatggcgcaggatgcaacattagttgaaaagacctcgattgtaggtcgagtaggtattatgcttttaagctgtggtacaggtgcttggcgagtacgtgattcaatggatacggttgccagaaccttgggcattacctgttcaacggatattggattagtgtcaattgaatatacctgttttgatgttgataatgaatcatattcccagactttatcgttaccagcaacaggtgtgaatatgactaagttgaatgaaatggaaaaattcgttcggcaatttgaaaagggacatggggaatggactatcggtcaaattcataaacgcttacgggagatttctcagcaaaagtcagcgtattctccgttaatttcgggacttagttcaggcttggcctgcggcggctttattttcttattaggcggcggtcttcctgaggtgatctgtgctttcttgggtgcagcttgcggtcaatatattagagcaattatgggtaagcacaggttaactttggtagccaagattgcggttgcggttgccatagcctgcagtgtttactttatgagttttcatgtaggagaaatattattccacattaatcatgatcatgcctatggctatattggtgccatgttgttcgtaattccgggttttccatttattacatctggattggacatgtctaagttagatatgcgctctgggcttgaacggctgacttatgcgattttaattatcgtaattgcaacgatggcaggctgggctgtagcaacaattttgcgtttgcatccaggatctatgcctaagttaaaaattgatccagggactttaacctgcttgcgattgctggctagcttttgtggggtgtttggtttttcaattatgtttaacagtcgaccacaaatggcagctacagccgcggtaatgggagcaatggcaaatacattacgtcttagcttggtcgattatgctcaggttgctccagctttggcagcatttattggtgctttaacagctggtctattagcaagtattgtaaggaaaaaagttggttttccaagaattgcaattactgttccatcaattgtaattatggtgcctggtctttacatgtatcgagctgtatttaactttggaatcacgaatattaatatcggagcttattggatcgtagaagcgttgatgattgtcgtggccttgctattaggtcttttagctgcacgtatcttaactgataagaagtggagacatgcagattaaataaattaaggtagaaaaaagagacggattttttgtctgtctcttttagtttgctattgttaattaatcatgctttctttttgtaatagtaaatcccagtagtcctagtgctgctaaagctagaccgattaagctcaggttagaattattttgactagtttgtggtaatttagaactaatattattgtaagacttaacgatattattagtagttctagtctttgttgttgaatttggaatattattaatggcagttccatggggtggaataattccatctttgtgttgcttctgtctttgcatatcagtgccataaggatgactgctagaattccaatttacttttttgtgaatctttgtctgtttgtattcattagacttaggtggttcagactcatatggtgtattcggctcagaaggctgcttcggttgttctggagtagtcggagtctcagattcaggtataggaataggagttggggttggttccggtttagaagcggagtaactatagggtacccaaatgctaatagttgctagattgccagttgttgttttttgaccattaactgtggtagaagcaattgaagctaaaaactccgaattaggtgcaattgcggaaatctcagtaattgaattgcttgtagcagtaagtttattctgtgaagaagcaatgtgaatcacgccatttttatctaaatgataatggccatcaattatgtctttaattgtagtattgttatacggaatagctgaaaatgcttgattgtttgatatccattgtgaccagtttgtttctgtgccttgcggatccttaactaaatcaaccaccctgcttctagagtaaataacttcttttactacatttggagtaggtgtttcatcatttttaggaacagccacatctggattatttataccggaaaagttttggctcttaggaccgtttacatagtagccttttacttcttccccaactgtagcagtttgcttttctatctgcgtttcatgaactaagtaaatgatgaagtgttgatctacattttcattattataaaagttgccaaagccgatactgctgtccgtttttaatgtggcattggcgccagaaactttttcaattttatagtgcttatttttaaataaagctaatgcttcttctaacctgctaaattgaataggggtattagctgattggtcgtctttatttttgtaatcagcactaagcccttgaccagctaaagtattttttgatgtatcagaggtcatgccagtactactagttggttggccagatttattacttagtacagtatctaattgaatgaagtatgcatgggtactgtagtcataactaggatcattaggattgaatttttgaccagtttggtttactgagaaaccagtagcttgtccagttgcatttttaactaaatgagcacgcaaaaagtccgcaaattttgtcttttcattatttccagtagcaattatgctgtagtaattttcatcggacttatcagctccatcgtaaaaatccttaattccgtgccgtaatgcattttgatccacggacattccacttggaatctcgaagactttgattgaagaaggaattaaagtttgatcttgactaaaagcaactttaaatattgcattatacaaggaaaggggaggattatttaattgattaccataattgaaatagattccccattgaagcaggtgactgtcatcgtttaattttaattggttaatatcttcttctgagatattgtttttctctgggtatactttaccatcatcagaaccgttgaatgacttttgtcccatagcaaagccatggatcaattcagttggggggtaactttatccttgtaaggtgttaaatcagctgtgaaggcgatttggctttttccatcaatttctacattgaaagcctgattttttaaatctgatttaactgtggatccattagcaagagctgggatggttaaatcaaggtagtcgggtgaatctttgctaatcgaattattctaaacggcaacaagttgactattgtcattatgatcgactgccgtaatatcccagtaagattgactaccggcattattactgaaaatctttgtttttccagtattaatttgatagtttttactttctccagtatctggcaagttaatagttaaagaattattttgatctaatttaggctggttgattttaatgtcaacattgatggtatcttgaccagccattaaagaagctgattcatctttttttatttcagaagcgttgttacctttttcatctgtatgaaaagcggtaatttcgactgtttgttgttttgttttttcttggtttggtgaatctttagctgaactttgattattttggttacttggatcagcttgagttgactggatggtattatttgactgttcttgattagatttttgtgaatcttgttgagtttgttcttcattagtcgcagtattagtatccgcatgaacaagttgactattacttaagaaaaaagtagtgctaagtgcaactgcagctaaaccaacagacaactttctaaaaccaaatttttgttttccattaaattttgtattgaagctcaaatcatttttgtgtttaatttatctaaaccttcttttgggaacgtaaaagactgagtcttttacaatttattatcaatgtgttctttttacatttgacaacatattagattagcacaaataaataacattgctgatataaatttgacttttttataggcaaaaactttctttttagtataaatagtttagccttatatattaaatatttataatttgataataaataactattatatagaaaataaaaaatggcatgatatcaaaccacgtcattttaaatctgttattattttttcgctttatttacttggcaattgctaatgccgtaacaacaaaggcagcgatcatggtaactacaaagccaataattcctaacaatatattcatttttgtcatcttcttctatgtaattgttatattctgtatgcggtacatatatttactataacacaaaagaagaagaataacgcaataaattgtaagcactttttattcttttagatcaataaaaggagcatggcagaatttggctaagtcttctgggttcaaaaagacactgcggccaacttcaccactagaaacaccaatttcaggatttccttgcatagagtcatccaaatagataggaaacttttccttaaaataaattccgataggagtattagcgccatgtacataaccagttgttttggctaatttctttaagggaagcatttcacattttttgttaccagaaactttagctaattttttcatgcttaaatgttcagtaactggtacgacaccaaccaatggaccagttttatttccttcgcagacgagagttttatagactaaacgctctttgtcttctaaaatagaagtgttcatttgtgcaactccgcctttatcttcggagacagcaaattgagcttgacgatacttgattttattttggtctaagattttttcgaccaatgttttttcgagtttgttctttttatttttcttctttgacatatttatcacctgttatcatgatagcattatgccaagaaaatcccaaaggagataatattaatgaaattactaattattaaaattgatactagtcatgaagttgaagacgctttgagcgtttttgctttagataatctgaatgcattgggtattgaatcaagaaagcgtagcgactttgagcaagcaggctggttgcatgattctactgtagttgaaatggatgacattaaagacttacctaaggatacatatttctatgcttattttgatgaagaagcagataaagacgcattagtaaaaaaattccaagataagttaaaggaattgaagagctatggcctagatgtaggggatgccaaaattacaacttcatacattaaggaccaagattggaacacggcatggcaaaagtattatcacgtgattgatttttcacgtcacttggcaattgtgcctgaatgggaagattacaaacccgcttttaaggaccagcaattaattaagcttgatccaggcttagcttttggtacaggaaatcacaaaactactcaattagcaatgatgggcctagagagagcaatggttaagccaatgaatgtagtggacgttggtacagggtccggtattttggcaattgctgcatcaaaattaggagcaactgacgttttagccacagatatttcagatgaatcaatgactgcagccaaacaaaatgcagccttaaacgatattaataatattcacactcaaaagactagtttgttagctgatgttaaaggcaagtttgacatcattgttgccaatattttggcagaaattttactagacttgattccacaaatggatagtcatttaaacgacgatggtcaagttatcttttctggaattgactacctgcaattgcctaagattgaaaaggctctagacgagaatggctttaaggtcgatttaaccatgcgtcaaggtcgctggattggactagcaattactagaaaagaaaaataaatatggtaaaatattatcaattaaattaaactttgatgagaggcacaatcttttaatgaaaaaactaggaaataaaatcgaagcaattccaattgtcaggaagttgaattctcatcgctggatgtcacttgtctggtggagtattttggtaatgattttgccgtatatctttagcatttgccgtgtgccggtagtgtggcgagaagcaattctgttttttattattaacagcatcattgcataccatctaggcaatttatttattaaacttaacctgtccaagtggtggattttcttgttacctgtgcttttctgcttagcaatgttgccacattttgctttgtataatttaatgtttggtttaatttacttaataattgaagcttttggcttaatgaataaaaatatttaccgctagaggggatgatcataatgtccaaatacattgaaatgacgcatgatcaggtaattgatacctgcaaaaagtatatgaatgatgaccaggtggcctttgttgaaaaagcatatgaatttgccaataaagctcatgctggacagaaacgggcgtctggacaaccttatattattcatccaacgcaagtggctggaactttagctacattaggcttagatcctgatacagttgcagcgggctttttgcacgatacagtggaagataccccagttacaaatgatgagctgaaggaaaaatttggtgaagatgtagcttttattgttgatggtgtaaccaagttaaacaaatatgagtacaagtctcatcaagaatttttagctgagaatcaccgtaaaatgttgattgccatggctcaagatctacgtgtaattatggtgaagttagccgaccgtttacacaatatgcatactctgcaacacttacgacctgataagcagcggcgtattgcttccgaaacaatggatatttatgcaccgctggctgatcgtctaggtattgggacaattaagtgggaactagaagatatgtctttccactacttaaatcccgaagcctattaccgcattgttaacttgatggatgtcaagcgaagccagcgtgaaaaatatattgccgatacaatcaagactttgaagaagactctaaatgaattaggcattaaatatgaaatttatggtcgtccgaagcatatttattcaatctataaaaagatggttaataagcataaagattttgatgagatttatgacttattggccgtacgtgtaattgttaaaaatgtgcgtgattgttatgctgttttgggtgctgttcatactgaatggaagccaatgccaggtcgttttaaggattacattgctatgccaaaggttaacggctatcaatcactccatacaaccattattgggcctggcggtcgtccactagaaattcagattagaactgaacaaatgcataaagtagctgaatatggtgtggctgcacactgggcttataagcgtggcaattttactggtgttgagcaaagtacctctggtgaaaagctggatatggtaagagaaatccttgaattaaaggatgaaactaaagatgccggtgaatttatgaagtctgttaaaagtgatattttttcagacagagtttatgtttttacgcctaaaggtgaagtatatgaactacctaaaggttcggttacgctagattttgcctatgcaattcacactcaagttggtagtcatgcagtaggtgccaaagttaataacaaattagttcctttggactataaattacgcaatggcgatgttattgaaattatgacacagactaatgcagcgccatcgcgtgactgggttgacatggtgaagacttcaagagcacgcaacaagattagacgctacttcagaagtcaggatagagaagatagcatccagcatggtgaacaattgattgctgatatgttgcgcgatgaggatctttcacccaaagaatttatggccagggatcgaattgaaaagctattagagcactttaattatcacactgcagatgaactatatgcggcagtaggctttggtgatctttctgctcaagcagtggttaatcgcttgacggttgatttgcgccgtgaggaagaaaatcaaaaacaaaaagagctggaagaaaagattttgaattctggacaacaagcagttcaagaagaacaacctaagaagaattcaaatactacaatgaaggttaagcataaaaatggcgtcatgatccaaggcgttagtgacttaatgcttcatttagctaagtgttgtaatccagttccaggtgacaagattattgggtatgtaactaaaggtcgcggtgtaactattcaccgaacagattgccgtaatatcaccaaagaagctgaagaacaaggccgcttaattgatgttgaatgggaaaatgttgaggaaaatagtgttcaatcctttaatgcaaatattgaagtctttggttacaatcgttccaatctgcttagtgacgttattaataagttgaactcacttactaagaatattaataatatctctggtaaagtaaacgaagataatgttgcacatatgtatgtcacagttgctgtacgggatgcagatcaactagatgaaattttgagtaaattacgtgatattccagacgtatacgaaactaagaggtcagataattaatgcgagttgtaattcagagagtaaatcatgctcaagtagatattgacggtaaaactgtgggcaagattggtaaaggctttttattattagttggcatcaaaaatggtgatgaattgccagtaatcaaaaaagcagctgataaaatagctaaaatgcgtatttttgaagatgaggaggggaagactaacttgtctttaaaggatgttaacggagaaattttgtcggtatcacaatttacgttgatggcaaatactaaaaaaggcaaccgtcctagttttgttgatgcgatgcgtccaccaagatcgaaagaactttgggaagactttaatcaagaactagaaaatgacggtttccacgttgagactggtgagtttggggctgacatgcaagttagtttagaaaacgatggtccattcacgattgtgttagatctttagcgaaaaaatgagaccgcaaaggttgacaatgtcttgagaaaaatataagctaagtaagaattatcgatgacaaagaatgtggattagcaatgatctattcaaagagactgctcgttgtggtgagagagtagatagatcgcggtctgtgacacctttaacagataatggatcgtttggcgagcgttaatcgcagcaaccaaaaaggtggtaccgtgctaatctaagcgcccttgattaagttcaagggcgctttttatttttaatcaagttatcaaaatataaaaaggatgattaaatgagagttcaaaaacctaagggaacagttgatattttgcctgatcaatctggttcatggcaaaaagttgaagaaactgccagaaatttcttcaatcgcgcaaattatcgtgagattcgcacaccaagttttgaaaattatgaaatctttgctcgttcaagtggcgatagttcagaaatcgttgaaaaacagatgtacgacttcgatgataagggtggtcgccatattgcccttcgcccagaaggaacagcaggcgtagtgcgggcttatgtagaagacaagatgtatgcgccagaagttgttaagccatttaatgttttttatatggaatcaacttttagatatgaaagaccacaagccggtcgtcaacgtgaatttcaccaaattggggtagagagctttggctcaagcaacccattaagtgatgtacaaacaatcatgatgggacatgatttattgggtgagttaggcgttaagaattaccaacttcacattaacactttggggaatgagcaagtacgtcaagattatcatgatgctttggttaattatttcactcctttgaaagatgagttatcagaagactcacaaagaagattgcgtgataatccattgcgtattttagattctaaagatgaacgtgataagaagttcttgcctaaggcacctaagattcgtgaatttttggatgacgattcaaaagctaattttgacgcaatcttgaagatgttaggtcaacttggtattgattatgtaattgatgatgatctagtacgtggacttgattactatactggaattatctttgaatttatggttgaagataagagcttatgggaaagtgcaactactattcttggtggtggtagatatgatcacttggtagaagaattcaatggacccgctactccagccgttggtttcgggattggcgaagaaagattgatgttagtgcttgaaaagcaaaatcctgcattattcgagaaacgcggtattgatttctttattactaatattggtgacggtactgcacaaaaggcaattgaaattgcacgtagccttcgtaatcaaggttttgaagctgactttgatgtcaatcagaagaagttaaagaaccaattcaagaaggcagatcgtgaaggtgctaagtatgttattactttaggtgaaaaggaactggctaacggcgttttgaatattaaacgtttagctgatggcaagacaatcgatttaagtcttgaagatctaaataacatgactaaaataatggatgaattgaaggactagtaacaatggaaaagatcgaaaaaagaacagattattgtggcaatattactgaaaaatacatcggtcaagatgtaaatctctatggttgggtacaacgtgtacgtaacttaggtaacttggttttcatcgatttgcgtgaccgtgaaggcttggttcagatcgttgttaacaaagattctggtaagaagttaatggatattgccgattcacttggtaatgaatatgttgttcaagttaaggggaaagttgttaagcgttcagaagttaaccctgacatgaagactggtcaagttgaagttgatgcaactgaaatcattattttaaacaaggctaagaaccctccatttgaaattaaagatggaattgaagtctcagaacaaactagattaaagtatcgctatcttgatcttcgccgtccagaagttcaacaagcaattattttacgttcaaagattttgcgtgctactcatgaattctttgatgaaaatggttttattgatattgaaactccaatcttaggtaagtcatcacctgaaggtgcacgtgactacttagtaccatcaagaatctatccaggtagtttctacgctttgccacaatcaccacaactgttcaagcagcttttaatgggtgcaggatttgacaagtattaccagttagctcgttgtttccgtgatgaagacctacgtggtgaccgccaaccagaatttactcaaattgatatggaaatgtcatttgctgatgaagaaactattcagagttatactgaaggtcttttgaagaaaattatgaaagatgtcaagggcattgatcttaaaactccaattaagcgaattacttggactgattcaatgaacaagtatggctgtgacaaaccagatactcgttacggtatgttgattcatgacttaagcccaattttcaaggatagtgactttaaggtcttctccggtgcaattgctgatggcggttttgttaagggaattgctgttaaaaatggtgcaaaagaatactcacgtaagaagattgacaagaaggctgactttattaaacgtttccacgctaaaggtttggcttgggttaaatttgaagatggcgaattttcaggccctgttgctcgcttcttgactgatgagaacaaagaagctttgaagaaggaatttgatcttgaaggcggcgaattagtagtattcgtaactgataagtggaaggtatgttgtgattcacttgaccaccttcgtcgtgaatttgccaaagaaactggtattgttcctaagggtgtttatgactttgtttgggttgttgattggccattatttgaatacgatgaaggacttggccgttgggtagcagctcaccacccattcactatgccagatgatgaaggggttaagttgctaactactgaacctcataaggctcacgcacgtagttatgatattgttatgaatggtgatgagatgggcggtggctcaatccgtatccacaagcgctcaattcaagaaaatatgtttaaggcacttggtttcactaagaaacgtgcatatgaacaatttggttacttgatggatgctttggacatgggcttcccacctcacgcaggtttagctatcggtcttgatcgatttgcaatgatgcttgctgataaggataatattcgtgacgtttcagcattccctaagaatgcttctgcttcagaaccaatgatgcatgctccagctccagtagctgatcaacaattagctgacttggggatcgaagttgaggaaaagtaccaagacagtgtaaaggcaaccgaagagcgtcttgaaaagatggctgctgaagatgctgcagaaaattcaacttgggataagtaataaatcaatataataaaaaataagtgatctcgctttaattgagatcacttatttttttatctgaattataaattattaacgaaattactaatccgagctaaactttcttttaattgctcagttgatgatgcataagaaagacggacataaccttcaccgcccttgccaaagtagcgaccaggagtgacaccgacttttgctttttgagccagctcaaaagcgaattgttcatcattggtgccatatttttcggggatcttagcaaaaatgtagaatgctccttgcggtgtggccatttcaaagcccaacttttctaagccagattgcataaagtttaaacgtgcttcgtagatttcacgtgcttttttaggatcgttttgaccattgtttaaggcttcgacagcagctatttgaacgttatcagtaactgaagtaactaaaaatgaattaatcttgcggatgctcttcatgatttgtttaggggcagcaatatagcctaaacgccagccagtcatagcataagccttggataaaccggaaatcaaaatatttctgtcagggatgtattcagaaagtgagtgatgtttggctttgccataaacaagttctgcataaatttcatcagttacagaaaagattttgtattccttaatgacatctgctaaggcttttagagctgtggcagaataaacgcggccagttggattagaaggatcagttaaaataattgcctttgcacctttaccgcgaccattgagaacatgacgtaaatgttcagctgttaagatgaagtcatcttttttagtatcgacttgaatagggattgctccagtcattttaattagctgaaagtataaagcccaaaccggagtaggaaccaaaattttgtcaccggggttaagcaaggtcataaagacatcatttaatgcacctgttgcaccgacagtgacacagatttcactttttggatcataatgtacaccaattgagcggtcaaggtaattgctaatagcttcaagtagttctggcttaccagcttgaggagcataatgggaatcattagcctgaatatcacgaattgcggcatctttaatatgatcaggtgtcgctaaatcaggttcaccaatagttaacttaataatcccagaaatttcagagaccttttggtcaaatgctcgaattttagatgcggtcaagttgtttagtctctcattaatagttgaagttaaatcactggataaatttggcatatataaagttcctttctgtattatataaattttaaattactcattaatataaaacaactatttttaaagcaacttgtaaattgaacaaaaaataggaaactgtcaaatcttttgtgtaaatagttctttctcgtaaattgattttttaattatttatttaatcaaagtaggattctaaggtgtcctgaacctgaccaaagcctttatgaattcgattgaaataacggtcattgtagctcattgcctgaatgccaataaaagcatcaagcgactgttcagttggaaactctgccttaggcttagctttgcgcttgatcacattgttaaatgattcaatcatgttagtcgaataaattgaagctctgatctgcttgggatagttataaaagaccagcagatctggttctatgtctttcaagcttctgataacatggctgtaaaccttgccccatttggtatagaagtcatgcaggacagctgtggcttcttctttgtttgtctgttgatgcacctgtttgaattcgttcatgatcttttcacgatcgtcgacgcgtactttagcgcagatattgcgcatgacatgaaccaaacagcgttgaaaatgagctttaggataagtcctggtcaaggctgttttcatgccaacaacaccatcagaaagaaaaagctcaacttgctttaagcctcgggatttcatgttttgaagcatatctgtccagacttcaatgttctcgctaggcgcaatgcagtagtcaatgacctccttgtgcccattaggcttgatgccaatggcaatatagactgcttcacgctcaaatgtttctcgatgcaaaggaaggtatgttgcatccaaatagatgcagaaaaacttgtcgcttagcttgcgcttgtgataagcctcaacctttggaatcatctgcttggaaatatttgatacctgagctggactgtaatggctgccatacatcttttcaattagatcggctatttccctggtggtcacgcccttggagtaaagcttgataatcatgctttacaagatatccgagtgctgcttgtagtcaggcagcgtgtgctgatgaaattgaccgttgcgatcccgaggcacttgcacttcaattgggccaaattgcgtatcaactttgcggaaataagcaccatttctagagttgccagtattccagccatttctggcatagggatcatagcccagaaaggcagtcaattcagcttctaacaagttattaacagcctgttgtagctctttgcgcaataaatcatttattttgtctggattgaatagagcttgagcaaaatctttggtaaaatcattcatgaaggagttcttctttctgtatgtgtttttttgttcaaaccaatcatacgagaaaggaactcctttttctaatgtttaaagaaataaatttaaggaatcattcatccttacacaaactattttacagtctcaaaaatagggaagatgaaactaatcatttccctatttgtttttaagaacagtattcaaattagtataaattgctggcttaggctgagatttatctggcatttgcagccaatgaggcaaaattccatttaaaggttgaagtggccttttagtgggctgatgcaactcaagcttcctatcaacaatcttgattgtagtggcacttttatcacgtggtacagaggatgattgtggtttagtgcaggccgataagctaagtaagaatatagttagtaaaagtagtttttgcatatttttcaatttttcctccaaatataactcccaacacaatattctactatttaagcctgaattgtcaaattaagtgcaacagttaggctatgaggaaatatattgcttgaagagttcttctgctgtgtgatattgaaggattcgacgatgtttgcggttaatggcatcagttgcctgttgaacataagcagctgacttatctttcatgcttttgcctttagggaagaattgacgcagaagtccattgcagttctcattggtgcctctttcccatggagaatatgggtgggcgaagtagatctggcagcctttgatctcggtcatatccgcaaactcagagccattgtcaaacgtgatcgatttaaaccaggcaggatgtctgtcaatctcattttgaagcagcctttggcatgtgcttgcccgatagtcaggaatcttgataactacttcaaagcgtgtggttctttcggtcaaagtcattaaagcaggctgattcttgcgtctgacgcctttaaccagatctccttcccagtgcagcggcgtttttctgtcttcaatctctttaggacgctgttcaatggaattgccaagatgcttcttgtgcaaagcatgaccgctatggccgtgatgacgcttgttcctgcgtcttttgagcttcataggcagatcaatattgcttatgtccagcaagccctgatcaatatagcgatagacagttggtgtgctgggacaagggtagcctggcatagtccttttgaattcaccaacgaattcatcgatgctggtggcatcaaatttagctttaaagcgtctggagagcattctcaaaaagacagcataatgcttcaatggattgcgctgatagcagtttttgcgacgcttctcataataaatctgtgcagtatcagcgtaatagtgctcatacaataaatagctgctgtctctttgcaggacacttccgcgtttgatttcgcgactgattgtcgacttatggcagccgacttcttgagcgataacagtacgggaagttatgccggaatccagcattgcttgaatttgtccacgttgtacgctggttaattgatgatagtgcttagaaatgctagaatttgaattggtcataaagatcttcctttcttgatttttcgtcacttcaagtttaggtcttcatggcctttttgtttaacacttagtgttgcacttcaattttaaatccgggtctactatttaagtggacaatgataaaataaaaataagtttagatgacgaggaatggtaaaatgagtcgaataacaatttatatgacaggtggaatcgctgattataaggcagttaacgttatccgcgatttagaaaaagcgggtcatcaagttcaaatagtaatgactaaaaatgcagagcattttgtaactactaatacactggcagctttaacaaagtatcctgttttggatgatttatggagcaaggaaaatgaggctagcataccacatgttcatctagcgcgttggacagagttagctctggttttaccagcgactgcaaattttattgctaaaatggcaacgggaattgctgacgatgcagctagcactacaattttagctacaagtgcacctaaattggttgtaccagccatgaatgaccaaatgtggaataatccagctacacagcgaaatatagcttttctgaaagaacatggtgtagaaataatggagcctgcagtagggatgctggcagaaggctatgctgctaaaggacgaatgccagagccaggagcaattgtggcgtggatcaaaaatttcactgaacaacagaacgttttgcaaggaaaaaatattgttattactgctggtggtactgaagaagcaatcgatcccgtccgctttattggtaaccgctctagtgggaaaatgggcatttccttagctacagaagcagcagcgatgggagcgaaagtaaagctaatatatggtaatgtaagtatgcctttgccacaaaatcctaggattacattaattcatgtttctagtagcgaagaaatgttagttgcagtcaaaaaagaatttaagcatagtaacgttttaattatggctgctgcagtagcggattggcgcatgaaacaagttgcagatcataaattaaaaaagcaagctgatcaacaaactttgactctaactttagttaaaacgacagatattttacgcgaagttgctagccacaagcagcgagggcagatagttgtcggctttgcggcagaaacgaataatttgctacaaaatgctgcaaaaaagctatcttcaaaaggtgccgatatgattgtagcaaatgacgtttctaaaaatgtttttggcaatgatgaagaccaggtaacgattttacaaaaaaataagtcaactaagaaatggcctaaaatgagtaagcgaaagattgctcaaaaattgttgcagcttattgctcaaaaaatatagtatttgcatatagctaatagtgaactatatgatttatattgctcttgtaatcattttgtaatataacatctagactttttaaaaatgtgatgaaaactataatgtgaaaactaaaaataatatttagtaagtaaaagatgttttttatccttgtttaaatgataaatgctggtattataggtgttgggaattaagagactgaagagaaagagttgataggacatcatcagccctttctttttttatacgaaaatattaattttgtatagaataataaaataaattatttgataatctttataaacctagcagcattgattgatgctactattttaattagaaaatataacagaaccacaaaaaataaaatgtatgtataggatttgcaacaattttgttgtatgctattaacagatggctgaaaaaaacaattattgtttaataattgttattagctatataaatacaggaattaagaaacagagacatattagtaaaatgtagaggtgtatatatgtactctgataaaactttaatgctcaataacggagtagaggttcctcgaattcaactaggaacttggctaattaataacgatgatgtacgaaaagtaattcgtcaagcgattaatgttggttaccgcgctttcgacactgctaaagactatggcaatgaaagtggtgtgggaaaaggtatttggaactctgatgttgagagtagtgatattttttaacaactaaattaccaacttcgattaaagactatgaaggtacaaaaaagcaattgatgacgctttagatcgatttagtttggaatatattgatatgttgttaattcattcaccacaaccttggattgaagtgaatagaattaatgatcgtcactttgaaggcaatctggaaaactggagagcaatggaagaagcacttaaagccggtaaagttagatcaattggtgtttcaaattttttacaagaagacgtagctaacattgttaataacagctcaattaagccagtagttaatcaaatcgaagttcatataggaaatgtgccaactgatttgatgaaataatgtaaaaatttaggaattcagattaaagcatattctccacttgcacatggtcgtttgttaaaggatccaagaatcaggacttacgctgaaaagtatcatgttagtccagctcaattaatgttagcatttgacttacagctaggttgtattgttttgccgaagagtgataatgttaaagaaatgcaggaaaacttgaacatcgattttgaaatcagtgctgatgatatggctgatttggtcaagttaaaagaaaatacgcagaccatggctgtttaataggagcatcgcataagcggtgctttctttgttttaagggaaaaggtaatggaagaaattaagctaatcgcgatagatattgatggaaccttagttaattctaagaaggagattacaccagcagttaaaaaagcaattttgactgctcaaaaacaaggcaagcaaatcgtaatttgcacaggtcggcctttgtcaggtactcaacgttatttagatgaattagggcttaatggccaagaaaatcagtatgtagttagttttaatggtgcagttgtagaatcaaccgcggggcaggttattttcaaacaggggctaaaatatgaagattatgtagatttagagacaattgcgcgaaagctaaacttacattttcatagcgtatcgttagatcgaatttatacagctagccgtgatttgggacattatacaatttataattcacgggtcgtaaaattagaagtctcatatcgtacacaagaagaaatgaagcagataccaatcatcaaatgtatgtatgttgatgatccagactatttagatgataaaatagaatctcctttatttgaaatgatgaaagatcgagttgtattttcaaagactgagcctttttattatgaagcaaccgctgccggtgtcgataaggggactggcctgaaaagactatgtgactacttaaaaatagatcgaagtaatgtgatggccctaggcgatcaagcaaacgacatgccgatgttaacttatgctggattaggtatcgcaatgggaaatgctgttgaatatacaaagcaacatgctgacgaagttacggctgattgtgaccacgacggtgttgcagttgcaatcaataaaatattaaagtagatgttttctctttcaaatagtggtatttttactttaagatgaaaattgaatagaggtctaaaaataatgaataaagcaaaagttttagttttaggtggcttaagagatgaggccttaactgatttaaaaaatatttgtcaagttgatatcggtccagtaggacatcgaccagaagatgatcgtgagtgggtgcttgatcatattgcagaatatgatggtgtgatcgtagcaaagatggcttttgatcgagaaatgattgatgctgcgaaaaatttaaaaataatttcaacttatggcgttggctttgatcacgttgatgttgaatacgctaaagaaaaaggaatagttgtttcaaattgccctaagagtgtgttgcgtccaacggcggaacttgcctggacaatgattatggcatcagctcgtagattgcattattatgacgatgctttgcgtgaaggcgtctttttaaatgccgatgagtacgacaaccaagggtactccattgaaggaaagaccttaggaattgtaggtatgggtcgaattggtcaacaagttgctaggttcgctaaagcatttggtatgacaattatttatcataatcgtcatcaagtagatgatcaaattgcagcagaattagatgctaaatatgttgacttagatactttggcaaaagaagctgattttgtgagtttacatactcctgctacagctgaaacatatcatctggttaattcagactttttaaagaaaatgaaagacacagcgtttttaattaatgttgctcgtggatcgttgattgacggggatgcattaattgctgcgttaaagaatggttcaattgcaggcgccgccttagatgttttcgaaaacgaaccgcatccaagacctgaattggttgaaatggataatgtgatcatgacgcctcacgttggttcagctactcacattgctagatttaatttgtctaaagaagctgcgaataatgttttgtctttctttaaagatggtcaggcaattaatcaaattaactagttcaaacagagctaaaaaagacgattcatgcgaatcgtctttttctttacataatttttactgatgttaatcatgatcaagctgactatggtggtagccataaataaagtaaattacagcaccgatgattaaccaaatagctgccattaagtaaacttctgaacttaaatggcaaatcataaagatacaaattaaaccagaaatgattggcaaatatgggtatccgggaactttaaagccatcgttaacaatatctgttctttttcttaattttagaattccaaaggaaacaagagtaaaggcaaaaagtgtaccaaagttgaccaaattggctagttgatcaacggagaagaatgctgcacctgctgcaataataatagtgacagcgactaaggcattttgaggagagttatgttttttatctaatttactgaatgcactaggcaatagcccatcacgtgccatagcatagattaagcgagagcttgaatagatcattgtcagcatcatggtagccattcctagcatagcaccaaatgataataactctgctacccagttttgatgaacatattgcaatgcaaaagcaacgggattagatacgtttagcttggtataattaaccatacccgttaaaacgattgaaacgccaaaataaagtacagctgcaatagctaaagtgccaataattcctaggggcatatttttcttaggatttttaacctcggcggctgatgatgaaacaacatcaaagccaagaaaggcaaagaagactgtggttgctcctttgatgactcctgaaaaatgatatggcaagaacggatgatagttgttaggtttaatgaactgtaagcctacaaaaataaaaattaaaataatggcgattttaataaaaacagctacgacattaattttaattgagttcttcatccctcgtgacaacaggatactgataagtaaaatgattaaaacagaaaccaagtcaaaataaacgccattgttaagattcataggaccagaaatagcgtgtggaatttttagaccaaatggtgcaatgaaagaactgaagtatgatgaccaacctgctgccacagtggctacagatagcatgtattccaaaatcagtgcccaaccgataatccagcctgtaaattcgccataaacgatattcccatatgaataggcagaaccagctactgggatcgctgaagcaaattctgcataacacattccagctaaagcacaaacaattgctgcaacaacaaaggataaactaacgccaggtccagttaatgtggctgcaacagttccgggtaagatgaaaataccggtcccgatgacagctcctacgccaagagacattaaatcaacggcgttcattgttttggagaacttaatgtctttaccgagatagttctcaacattttgtttcctaaaaatattaaatttcattcgcaaacttcccttattatagattagattaattttacatgatatttttaatttttaaaagaagaaaacgctctatattttttatagagcgtttgaattaatcagctttaattttttgcttataccatttacaggaaaaatatattaaagcaattagaataagtcctccaataattaatgagtattcttcaaaaattaacacaatttgttcccaattttcacccatataggaaccaagaccaactagaatagcattccagagtaagctgcctaagctagtgtaaataaggaaattaggtaatttaactttggctattccagctggaattgaaattaagctacgaactacagggatgcagcgaccatagaagattgcaccggtaccgtatttatcaaaccatctgatagccttttgtacatcaccctttttaaagccaagtagtttgaataacttatgatcgaacaacttttctaatcgatctggattaagtaaagtgccaatccaatataaaactagtgcaccaactaccgcgccgattgttgaagcaataattacaccgaagacattcatttgagaatgatgggttgcaaagccagcgaacgatagaattacttcggatggaatagggggaaagatgttttcgattgcaattagcaaactgatggctaggtagccaaattggttaattaagtcaaaaactagattagtcatcaaaagttctcctcaaattttatttcttttaatatatcaacttttgtaccgaatagctatttctataagcaaagttaagatcttcttaaacagtctgtgttaaactattaaatgcaaattttttcagtgagatgagataatggcaacacaattaattgagaataaactaaaacttttaccagaaaaacccggctgttatttgatgaaagatattaacggtacggttatatatgttggtaaatctaaaaatttaaaaaatcgggttcgctcatattttaagagtaaacaggttggacgtcgtgctgaattagttcgtgaaattcgagattatgacatcattactgtatcaactgataaggaagcttttttacttgaaattacattaataaaaaagtatcaaccttattataatgttcaattaaagcagggtacgggatatccttacatagaaatcacgcgtgaacatgatccgcaaactcggttaactagtatcgttcataaggatggtggctactattttggtccctatcctaatgtatatgctgcccaggccactttgaagtttattcaaaaagtttttccactaaggcgctgtcatggttatcaaggcagaccttgtctttactatcatatggggcagtgcttaggtgcatgctttaaaaaagtgccacaaaaagaatacgaagagcaaattaaaaagatcaagagctttttgaatggagatattgctagtgttaagcagagtttgaccgaaaaaatggctcaagcagctagcaatcttgaatttgaacgagcagccgaaattcgcgaccaattgaaatatattgaagaaacggttgaaaaacaaaaaattatttccaatgataatacgcagcgtgatatttttaattattacgttgacaagtcttggatttctgttcaaatcttctttttacggcaagcaaagttattgcgtagagaaaccagaatgtttcctttgacagatgccacagatccagaagatgctttcacttcctttattgtgcaattttatgggcaaagaaatagggttttgcccaaagaaattctgattcctgaaggatttgataatgctactttagctgaggttttgaaggtacctgttagaacaccgcaacgagggcagaaaaagtcattgctagacatggcgaaggataatgctaagttaaagctagatgataagtttagattattagaactaggtaatcgaaaaactaaaggcgctcaaaaagaaatttttgatgctttaggcttaccatatggacactttattgaaagttttgatcactcccatattcaaggtgctgacccagtctctgctttagtcgtttttaaagatggtgaacccgaaaaaacagcttatcgtaaatataagctaaaaggtgaggttgaacatcaaaatggtggcgacgaagtacgcaacacgagggaagttgtccgccgaagatatggtagactgttgcgcgagcataaaagaatgcctgatttgattttgatggatggtggtcaaattcaggtcgatgcttgtttagatgttttacgaaatgaattaaatttgaatatcccagttgcggggatggttaaagatgataagcacagaacaaaccatttattatttggcgatcccatcaacggtattcctttgaaactgattccccttaatcccaaatcagagggcttttatttaatgacgcgcgttcaagacgaagtgcaccgctttgcgattacttttcatagaagacgccatgctaaaaatgctttgtccagtcgtttagattcgattaagggaattggtcctaaaagtcgtaacaaattattgcgcgaatttggttcattgaagaaaattaaagaagcttcaattgatgacttgcgtagagcaggattaacgcttactcaagcacaaacggtaaaattaacattgtaatccgagaaaacgcgatatcatgcgtatttctgtggtatagtattaaaagctagattaagacggaaggaagagatatacatgcctacatttgttgatcaaactaaaatcgaagtacaagccggaaaaggcggcgatggcatggtggctttccgccatgaaaaatacgtccctaatggcggtccagccggtggtgatggtggccgtggcggcagtattatttttgttgctgacagcggcttaagaactttgatggattttcgctatcggcgtaagtttaaggcggatagtggtgaaaatggtcgtattaaatcacaatatggccgtgcagctaaggatctttatttaaaagttccagttggtactactgtatatgattatgacactaatgaattgattggtgatttaactgaaaagggccaagaactagtcgttgctaaaggtggtcgcggcggtcgcggtaatatccattttgcaactagtgttaatactgcaccagaaattgctgaaaatggtgaaccaggtgaagatcgcgttttgcgcttagaattaaaattattggctgatgtcggcttagttggttttccgtcagttggtaaatcaacactgttatcagtaacaactaaggccaagcccaaaattgctgcttatcaattcacgactttaactcctaatttgggaatggttatcttgccagatggtcgtgacttttcaatggcggatttgccaggattaattgaaggagctagtcaaggcgtaggcttgggaattcaatttttacgtcacgttgaaagaaccaaagtaattctacatctagtttcaatggatcctaataatggtcgtgaggcaattgatgattaccataccattaaaaaagaactcaaaaattacgaaacagatttatcaaagaagcgagaattgattgtagcttcacaaatggatattcctggtgctgaggaaaaactagctgagtttaaaaaagcattaaaagcagaaggaaataatgaacctatttatgagatctcaagtgtaactcataaaggcgtagataagttgatgtcagatactgccaacttagtaactgaagttgaacaagaacaggctgaagaacaacctaagctagcacaaaagattaaagaatataagtatcaggcaccacaaaagaatgaatttacagttgagcaagttggcgaacatgaatttatcgttaagggtgaacaattagaaagattagttcaaatgaccaacttggatcaccaagacggtattatgcgtttagcaagaaagcttaagcgtttaggtgttgatgacgcactacgtgaaaaaggagctgttaatggtgatgatgtggctattggcaagtttgtctttgaattcgtacaataagagtagagatagggtatgaaaaaaaataggtttattacggggtattctggccttagagccttagcagttatcggagtaattctttatcatttggatcctaattcctttatgggaggatatctgggagtgccgatttttttcgtgctctcaggatatttggtgacagatcatatgtttaattcatatgataaaacaggatcatataataatcgtcatttttatttgagtcgaataaaaaagttatatccacaattaattactgttttatggttaagtgcagcctatatctttatctttcaacgaaatttactggctaaattaaatcaggttgtacttgcaaatctattaaatgtatttaatttttggcaaattcataatggtcaaagctattttgagcgttttgcagctaatgaatcaccatttactaatttatggacgatgtcaattgaaggccaattttatattgtttggccaattgtcatttatttactagttaaattggttaaaaagaaaaaaaatattttctggattttagttggtctatcagctgtttctgcattagaaatggcaatcctatactttttaaaggctgatattaatcgaatttattatggaactgatactcgtttcttttctttaggattaggagcagcattagcagttgtttggccgatagagagtttaaatcagcaagttgaacgaaaagtaggctggatactggacttggtgggccttgcttcatttgctttaatgttagcaatgtttttctctaagtggatgaatccacaacaagcctttacttactctggcgggatgttgttatttactttagatgtatgtattttagtagcggtaattgctcatcctggtagtcattggaatcaaatcctaactaataggttatttgattggattggatcgcgaagttatggcatctatctgtatcaatttccagtaatgatcttttttgaagataaggtaaatattggtgataatccaatgctgtatcaccttattgaagtgattttaattttagtgattacagaaattacttatcgtttgattgaaagaccaatgggtaggattacctgggataaaacgaagcaatattttgctcgaatttttaattttgaaacaaaagattactttaagaaaggtcaagcagccttagcagctttgattttaatcttaggatcagcagctattgctatttcaccaggagtaaaagcagaagactttaataaaagccaattagcacagcgaattaatcagaattctaaaaaacaaaaaacggataatgctaaattaattgaaaagttaaaaaaagaaaaaaagaaaaaagaaaaaaaatctaaaattattcgtgaagctgagcttcaaactaaaaagcatcctattaacaaatcctttgttaaatatggtatttcccagttagatttgcaatttgctcaacatgttcaagtaactgcgattggcgactcggtaatggccggttcgagcaacgatttaaaacgattaatgcctaaagcgttaattgatgctgctgtttcaagacaattgaatgttgcttttggcttattagatagttatcaaagtcaaggagttttagcagataatatcttaatagggttaggaactaatggacctttctcaatggaagatcttgatcgaataatgcatcaggctggacctaagagaaaagttttctggattaatgttcacgttccaactagagattggcaaaattcagtgaataatttgctaaatcaaggtgcaaaacggtatcataatcttataataattgattggtattcatactcgaagaatcatcctgactggttctacggtgatcatactcaccctaatttaaagggctcaaaatactatagtgcattagttaccaaaacaattgttaagcattcaaaattttagattagaataggattttcatggaattacaatttttaggtactggtgctgggcaaccttcaaagcaacgcaatgtttctagtgttgcacttaagttgctggatgaattgaatgaaatctggctttttgacgtaggtgaagcaactcagcatcaaattttaagaacaaatattaaattacgaaaagttaccaaaatttttatatcacataatcacggtgatcacatttttgggttaccagggttattgtcaactcgttcttttcaaggtgatgttggtcctattactatttatggtcccagtggtattgaagaatttgttagaacagctcttaaggtatctcggactaaaatttcatattctataaggtttgttgaattagctaaatcagggttaatctgtgaggataagggctttcgagtgtatacggagcaactagaccaccggatacctagttttggttttagagtagtggaggcttcacatccaggcgaattattaattgacaagttagcacagtataatgttcctaatgggccacttttggggaaattaaaaaatggcgaaaaagtaactttagctgatggtactgttttggatggtaaaaatttcttaggacctactaaaccgggaagaattgtgacggtcatctatgacacacgttccacgccaagtattgctcgtttggctaaagatgcagatgttttagtccatgaatcaacttttgcaggggatgaacaaaaattggcgcatgattattatcattctacttcggttgaagcagccaaaattgctcggaaagataatgttaaattattatgtctaaatcatatttctgctcgttatatgggtgctaaagggaaaaaactcgaaaaacaggctaaaaaagtattttctaatacagtattagttaatgattttgatcagattaatattccaatgaaaggctcagaaaaatgaaagactcattaagaaataaagttgttgtaattacaggtgcttcaagtgggattggacgttccattgcccttgaaagtgctggtcgtggtgctactgtaattttaattgctagaagaaaggaccaattagatgaaattgcagcagaagctaaagaactatccggtgctgaagcatatgtttttccaacagatatgggtaagccggaagaaattgaacaaacctttaatgcaattactaaacaagtaaaacacattgactttttagttaattgtgctggttttggtaaattcgaagaatttatggaccaaaaaatgcaagacgttaccaatatgttccaagttaatgttttaggtttgatgtactttactcgtttagtaggtagggtcatgatggaacaaaagactggtcaaattattaattttggctcaattgctggcaaggtaccaactaccaagtcagccgcttacagttcatctaaggctgccgtaattcaattttcaaatgtcttacggctagaattaaagccatttggtgtcaaggtaatgactgtaaacccaggaccagtttatactaatttccttaatgtagcagataagactggaaattatgtcaaaaatgttcaagaatttatgttggatccagatgatgttgcttggcaagtagttcacttctttggcagtgataaacgtgaattaaatttaccacttagtttagctgtagcggctaaattgtataatctatttccatcgattggtgataagatttccttaaagtttgcttctagaaagtaaaaaaagatggaaaaacaaagaaatttaattattggatcagttgtggctttaattgcagtaatttttgttgttttaaatacatcacctgtcgcaattaattttggcttttttaaggtgaggttaccactaattgttgtgttagtggtaatggtgattatcgggatgattattgcttggttctttggacgagatactaaggaaaaaacggatcacaaggtcactttcttcaataaaaaagagaagaaaatagaataaatcttgatttattagcaattgaatagtatgattgaactacgtgagtgattcggggttatatgaccctgaagcttaagactacaataaaggagatcaaattaaatggcagttcctgcaagacatacttctaaacaaaagaaacgttcacgtcgtggtcacattaagttgagtgttccagcaatgcactatgatgcaactactggtgaataccgcttaagccaccgtgtttcaccaaagggttattacaagggtcgtcaagttgtaaataacaacgacaacagcaataactagttaaaggacacctttgatatggtgtctttttttatgcctagaaaaaggaaaaagaaataatgaagttagtattgtttcactcaattaagcataagcactgatatatcaacacatatggtgctaaaaaacacgttttggctaaaaaatggctaaaaaggtgctttttttattctaaatatttagttgtgaaatagagttaattgcgtcttctttattcttattattaatgtgggtgtaaatatcaagagtcatttttatatttgcatgaccaagtaacatttgaactgttttaggtttaacattggtgttttcaattaaaagcgttgcaaaggtatgtctgaagccgtgaatagatatatggcgtaagtccttggctctaacataggaatcatctagcttatattttttagcatatttaacatttaatgcatgatctttagcatatacatctctaagccaatctcccggctggcttaaagaccaataattgccgtttagcctatgaaagagcttgactgagacgattttttcactcttgcgatgatctaacagcacttgctttaaattggctgagaggggaatagaacgccttgagttctttgtctttggagaagaaagaattagtttatggtcaacgcttgttaaagtcttgttaacagagattgtattgttaaccaaatcaatgtcgttccaggtaagtgccaacgcttcaccttttctcattcctgtagaagctagtaatttaaagtatgtataaacacactgatttacttgtttagccacgtcaaggaatgtatcaagctcttctttggaatacacattatcttccacattgcgacgcttgcgagtagttttcttagggataatgattcgactaattgagttatcagatatgtagcctaaacgcatgccatattcataaagtgatctcataattgatattacaggacgatagttaactaattcagttgctaatttatctgcccacttctgtaaatctttcactaagatactatccatgtaattattgccaaagtagggattaatgtggtgcttgtaattaacagttactctgctagcactttggggcttgacggtttctttgtaagttttaaaccataaatcaaataactcatgaactttaatttgtttttgcttaatgaaatcatcaggtttggttagcgccattttattatatgctgcttctgcttcagcataagacttgaagccacgtcttctagtgataatgggttttccattgctgttatgtcctagatagatctggaacataaaccgtttttttcctgacttcaatgaatattctttaattgaactgttttttcttttaggcatttttatttttacccccgttttgctaaaatagggtagacgaaaacgccaatgccagttggtttctcgtcactctattacattataagtattattaagtttactgatttgcgctcacttactgttccagcagtaggtgggcttttttgttttatagattaattccacttatagttatcataaacatcaaatgtggaacgtccaatttcattattgtcatcatcaaatatttgtgcccataaacgattaccaactttagacttactaattaagccataatgataagcatcccatgtagcttctttgttaataccacgcatgcaagtagtcttatccttgtcagataaattaacaaaacgatcattaacttccacagataagttagctttggaattaacagtaactttgcttacatattttgaccaattagtatctggatcatttttagaacggaaagccttaatgtttttaacaattaaagcattagtttggttagctttctgctttttaattgcattgcgttttttagccttttgactttcaattctttcttgtctctcaatatttgcggtgctttgctcattagaatgtcttatccataagaaccctcccactaaaaccgcaattattataataaatcctattgcacaaccaacagaaccatctttattgtcgtcttttttatcagtcatttattttggctccttatttctttcaggtttaacgtcactgtggacgattagtaaaccttattaagcgaaccaaataccacttcaagtacgtaatatttatctttagggatgccgaacgcttgagcaaaatcatagtaagtttcataccaaatgtcgttttccatgcagtaaagggagagcagattaatcgcaaaacgattagctgagaactctcctttttccattcctagataagcaagtttgtaatactcgggaacttcttccacaacatgaccgatttcatgtgccagcatgaaaggccgctcgttaactttatagtagttcgcattaaaaattattagtttaggattatgccagctgtcgcttggagcggtttctggcaatttcttttgataaaccacgccaataccatgctccatgcagtaattcattaaccaagttattacttcgttcattattaatccttcttaagactatcaggatggtcttttacatattgctcagctagggcacggtacattccttttaagtcgtcaggaattttaccaccgtacggcatgtctaggtcttgccaggtaagagtgtgtgaatcctctgaatcattattaggatttgggttatcagttaatccgtttaaataatcagtagtagtattcaaaacctcagcaacagctttcaagctttcactatttggttttttctttttccaactgtaaataaggtttttacctaatcctgcagctgttgcgacctcctgcaaatttgaaaaatggcgttgcttggccaattctttaattctgtcaaaaatcattatgtaagcacctcaaaaagcacttgcaaaaataaattaattcttttgaataaaaatattgacatttttattctttggaattattataatttttgtaagttaaatcaatagaaaaaaacagctaaagaaacatagcaattttaatggttggggaactatttaaatgctttatttcttacactattattttattccaaagaataaataatgcaagcttttatctatgtttttatcttactaaataaatatgaaagaaggtgagataagtgaaaactattatcggcgcaatgaaaaagaatttagaagaaatcagtaacgaaaaatattcttatgaaaccagaagctttttagctagtgcacaagaatatttagccaaggctttaatacaaagccttcaagctgaagatagtaaaaaagaaaagaccatctaagtagatagccttttctaagaattattgatttagacgattcatggctcgctgatattcagacttgaagcgattaatatcccatgcaggagtacttgtaggattatcgcttttcaacttttcagccaagacacgaataattgcaaccgactttgcaatctctttattagataattctgaatccatctaattcacctcctaattatgagatgaatctagtttaccaaatatagaaagaaggtgatcatatgccatcaacaatgccaggccgagagctggttcaaaattttcttaaggataatgatattaagattactgacttagctaagatgtataagctttcaaatcaagacgcacgtgactacgtctcaggtcgcaagactaatcctgcagctaatcgattcatcttaacagtcattagtgattttaatcttagatagaaaggagcataaaaaaatgcaaatctcaattccagaaagagttattgccagagcaatccaacagcaatatttcaataaaactgaagctgctaacttttgtggtgtaagcaagtcaacgtttagaaactggactatcaatcatagtgacgaactcattcctacaagtgtagatggacaactgctttacagtagagaaacacttacggattttatgaaagaacgtgaattatgatgcaaaacaaaaattattatcgtgaatttaataaaccgattcgcaaaaataatttagatgataaatttttaaatatttttatctttgtagtacttctagcctcaagccttctagcctatggcttttgggatgcaatttttcaatggatttgaaggagcaagaaatggagcttagtaaagaaactaaagataaattgtgggctgctacagatttagtgacaaccatttatgacttaaacaaaaagagaactaccagccatgatgtggtagttctcaagtaaataatcaaaggacagtataacacatgaaagcaaaatcagaaaaagagttaagaaaagaacgtcaatttatccgtaatcaaaaagcagatgaaagactcaagggactagatgtaattgtttgctactacggtgatgaacgttgcacgattggtcaacatgaaaaatttagtacctgtcgtgatttcattatttggtcaattgtacaagaacctgaagtggctgcagaagacatgggctttgactcgaccacagagatgtatgcgtggatgtttgaaaatggcactgacaatcacgaaatgaagcaattagtcctagactactatgacggaaaggatatgcaagatgaataaagatctaaaagactttcaagattggattaaaaaaatgcaagatgatgctgatgactgggtaatttatctggtctatcaatccaaaaaaaatggcaaaacttattcaggtgcaatgcggtggctgagtaagaataagccagaattgccaggtaaatttactgctgcaccaagtgaaacggtagcaaacgttgtccggtcgatttttgaagaagcaattgtcaaagtaaaaaacgaaggattagatagaaaggtcgacgacgatgattgatcaagattggttaaaagaaagtatcaagcaagaagcacaattaaagtttgctgctagatgggaaaatgcagagtttgattcgtctgaagcaagacaagcctttcaagtaattaaaaatactgatgaatgggaaacgttcaagaaagtaatgactaaagcatatgaaaaaacaattactagtaatgtccttaatcagcttcaaggactaacagatttaattcatgaagcaggtgaagaataatgccggcatttaaatggagcgataaaaaaaagcctaattatagatggcttgtctacggtattgccggtgttggtaaaacaacattgagtaaatatcttaaaggaaaaacttacttgcttagcttagataaaagctttgaaagagtgaaattttggcaaggtaatgatgacatttgggttttagacccagacaatccaattgaagacctcagtgacttctacaatttctttaagcctagcgactatgacaatctcgttatcgataatatcagtagtttgcagaaattgttctttgttgaaaaagctaaagaaaccaaaacgggattagctaataagatttctgactacaacgaatggaatacatatttaattagatttatcgctagcgtttttaaatggaacatcgatatcttagtcacggcttgggaagcacaaaacaatgttactgatcctagtggtcaagcatttatgcaatacggcccagacattcgggacaatccaagggattatttaatgggcagttgtgatgtagttgctcgtatgatccagaaaccacagtcaggagagcgtggattaatcatgcagggcagtattgatacttacgctaagaaccgcttagacgaccgaccagggtgcaaagcagaagactttttcaaatttaaaaagacagatcttgaaaaagcagtagataaagttaaggagaaaaaataatgtttagtgaaaatgtaaatgaaaagttgaagttagataaggaaatggaagacaaagtaagtgcaacgtgcatggatattcttaacggcagaactaaacatttcattattgtcggtttaaacgatgatggcagccaaattcaaatacatcatgggcatggtatcgtgctagctggtcttgtcagaaacattcaacgagaaatcgatcaagaaaatgatcatgccagaaatgccaatgagatcatcaaaacgatgaaaaatattcatgatctaaaagatgatgattaatgtttcaactatttaattatcagcaagacttagttaataaggctagaaatgctctagcagctggaaatcaaggcgttttaattgttagccctccaggatcaggtaagtcagtagtaatcagtgaaattgctagattaacagtaaaaaaaggtgaacatgtattattctttgtccatcgccaagaactagtaaagcagatcaaagattctttcaagcagcaaggcgttgatttaaatcattgcacaattatgaccgttggcaaagtagctaacagattacaaatacttccaaaacctaatttaataattgtagatgagtcacagcactcaagagctaaaacttatttgaaaatctttggttactataatgatgtccctagacttggttttactggaagtccttggcgattatccggcaaaggatttaaagatatctattcagcgatggttgaaggcccaacaactaaatggctaattgagcatcataaattagcaccatttactgtatatggctatcaactaggcgataaaaacttgcttaaaaaatctagtactggcgattataccagcaagtcgatggacgactttactaaaagcattattcatggtgacattgttaaatcttggcttaagttcgctaaagatcgtaaaacaataatttattgtcactcaacgagcttcagcaaaattgtagctcaagaatttagaaatgctggaattaatgccgttcatgtggacgctaaaacgccctctcagaaaagagaaaacatcatgggcagttttaagcaaggaaagataaaagtcctctgtaacgtggacttggtgtctgagggctttaatgtgccggactgttcatgtgtagttttacttagacctactgaaagtcttgtagtttatttacagcagtcaatgagagcgatgagatatcagactcataaacatgcaatcattattgatcaagttggaaattttgaacgctttggtttacctgacactgactataaatggagtttggatgatcgctctaaacatccacacagagagggtcaaagtgctgatggaccggcaataaaaacttgtccagattgcttcggtgtaattagagctgaattggtcacttgtcctttatgtggtcatgatttttctgcagaaattagagaaattaagcagaagaaagaacaagaattgcaggcgattaaagcacaacaaatacatatcaactatatctctactaaaaagcctgaagaattaaccagctttagagatttagcaatttacgggaaaatgcacaattataagccaggttgggcctggtatcaagctaagaagagaggatttattaagaaatgaatcaaattttagaaagcacgtatttaaagaaccctgaaaagtggcaaaaagaagccaacttacagggtggtcttgaaatttgtgatagcgatactggttggccaatcggcgtattaaaaccagacggtattcaatattactaataaacaaaggagaactaaaaaaatggcaggatttttaaacgtagattacaagaaagcaacagatacttcaattttatcagcaggaacttatgaaatgggtattcactcagttcaaggtgatggttcaaagaacggtcatgaatgtatggtattcgatatgatcgttcgtaaggacttagataaagtgccagaattagctaaaaccaatgctaagcatcatggtcagcatttattcgtaagagtatggactgctaaagatgcaaatggcaatgatactggtgcttacaagcaatcagatttaaattacattgctaaagcagttggcatccctgatggtgcagacattaaaactcaagatgattttatgaaaatgtgtgaaaacagaaccgctagagtacaagttggcgttaatgaaaatgaatacaaaggtgaaaagcgtaagcaaaacagctgttttgtaaatacttggaaaccaactaagtacccacttcaaagctctcaaccaaaagaagacccattcaagggcaatgcaggtagcgacactgaaattaatgataatgatttaccattttaaggatgatttagatggctaaatttacagattattcatcgattcctgatgaattattaaatctcaagcaatgggggctgtttcaattgaaatggctcccagagcgagaaaaatacacgaaaattcctaaaaatccttataactttggtgcaggtaagtctaatgaccaacgtacttggtcggactttgagactgcattgagagctttaaaaaaatatcctcaagcagatggtttagccttttactttgctaatggctttgtaggactagatgtcgatcacattgattccgaccttgcagactatgaagagggtgacactgatccaaacaatttagttaatcactttaagtcattaactcataattcctacatggaaatcagtcaatccggtaaaggcctacatgtgatttttaaaggcaaaattccaggcaaatatagaagacatggcaactatgaaatgtatgaatcgggtcgtttctttgctttgactggaaatacaattggcaagccaataattaaatcacttgataaaccagcaatgactaagctgtatgagttttgttttggcaaagacaaagttacaccattgcatcccgaaaatactgatgatgaagcaattgatttgccaatttctgaaattatcaagcgtgctgaagattcacctagttctggcaagcgattcacgatgttcatgcaaggaggttgggagcaattctataattctcagtctgaagctgatatggcgtttgccaatgacttagctttctggtgtggacgagacattcacaagatggatcagatattcagaagctctagcctgatccgtgataagtgggatcgtcaagatggcgcaacaacctatggccagcgaacacttcaaaaagcaatcaatgaaacacctaatgtctatacccccaattctgaaaacactggcaattatattttcagtttcaatgaaaagaaacaaaagcctaaacactatacacaagatgacatgggcatggcacaaagatttattgatcgatatggcaaaaacttcctttattcctacattgataaggagtggtatatctacaacggttcttattggtcaccagacatcaaaggatatattgaaacggcatcagatcatgtgattaagaacctagctaaagatagacctgctattgatccatctttacctgaaaaagatcagaagaaaattattaactcttggaataaatttgtaaatcatgaacgcagtcataaggcaaaagttgacttaatcaaagaattgcaacacagattgcctgttactcactcaatgtgggatcaagaggatatgttactaaatacaccaagtggctatgttgatcttactaacggcaaactacatccacacgacattaagaaagtgtttactgcagaaactggcgctgagtattccgacacaattgactgtcctaactggtgtaaattcttaaagcagatttttcaaaatgatgaagaagtaattcattatgttcaaaaagctatcggttattcatttactggttcaaccaaagagcaagtaatgttcatcccctatggtaatggtcgcaatggtaaatcggttctgttagacacaattcaagatgtcgctggtggttatgcaaaaacaatgaatgtttcttccattatgactaagtacaacaacaacggtgctaactcagacattgcccgacttgaaggaagtcggatggttatcagttctgaagctaacgaaggtcaacgattagatgaaggactagttaagcgacttactggtggggatcgaattgttgctcgccaaatgtatggtaaggaatttgaatatcaaccatcctacaaaatctggatggctactaaccataagcctttaattcgaggcactgatgaaggtatctggagaagattaatcttaattccatttgattatcaggttcctaaagataaaattgatcgcaatctaaagtacaaacttgaagcagagagcatgggaattcttaattggattgttgaaggtgcaattatgtggcaagttgaaggtttgcaaatacctgaaaggattaagaatgcttcacaaaaataccgtgaagaaatggatgttttatctggttttgtcaatgattgctgtgaactcggtcctggcttcacagctaagagtggagagttatatgattcctacaaaaattgggctgcggatgctaacgaatacaagatgactcttactcgttttggtaaagaaatgaataaaaaatttcatcgtaaagttaaagacggatacaaagtttatgaaggaattcgcatcaaacaggatacccgttttgaatggaactaagtgatacataagtgacactaagtgatagtttgaagtgacactttaagcctagagccacaaggctttaaagcaattttagtgatagttttggatttttttactatttatattattttttcttttcttttcttatataaaagaaatataaaggaaactatcacttactatcactttgcttacagccccaagggtttaagcttgtttcaactatcacttagaactatcacttttagaaaaatggagtaaaaatgcaggtaaaaatagactttaaaaacggcaatagaactgttttcaatgcagattgttatgatccgaatgatttaggacgtgatattattcaacaaattgcaaatggaaatcacttcttttacattaacggatataaaggtgcttggcttatggtagatattcaatccatacagtccttaatcatctcacgataactaaattcaaacaaaacaattggcattctagtgacggtgctgaaattcactacgctcatatcagtgtggaagtcgcatgatggaataattcgcttgatgaattatgagaataaaaaagaagcaaataaacaaattgaacgattatatgaggtgttctgtaatgattgaattaaaaaagatcagttctgaagatttacttcaagaactgatctacagaaaagttttagaaccgattgatgtcggtatttataaagaatttgagttaaaacgcaagtacaaaaatagggataagcctattaattttgatggagtgatgttactacacaatgacaactaaacaattttatatactgttgattttaattgcagatttaatagcaattttgattgatcaattagttcttaaaaaaataactggattttcattaagttggccatactatttatatttggtcttggttacttttatttcttcgttgataatttatgctcttaagtaatttaggagcttcagaattgatttcggttataagttcataccattcattaggattgtttgaatgtgatttgttaagccaacttagcattaatttctgtttttgcggaggcagtttaacaagtaattgagcattagcattagcaaattcatcttgtgatttatcttgaagatttaagtcttgagttaagatagcatgataataatggtttgcagaagcaacaaagtctgaaactaattctcttatcttattttgtgattcaatatctaacttatgctgttgaaattcttgttctttttgtagtttctcattatttaattcaaattcttgttttttgagtttataagtaaagatatcgtttacaacagcgactatgactggagaaataatagcagctatggcaattacaacagtaatttgactggaatcgaatttcataaaaaatcacctcctaatttacaagatgattctagtttaacaaacagaaaggataattaaatggacaatagttttaaaacatataccgataaactagcagctactttagagcagaaaaatcaagcttatggtgacagttttactaaatcgattgatgaagatggtttgctagtcttaaagattcgattaggtgataaatttaatcgagtttcttcactgattaaaaaaggcgaactaaaagaaaatgatgaatcactggaagatacgttactagatttagcaggatatagcattttgggattgaaatatttaaaggaacatgaaaatgattgataaagagttatttaatgaaggaattaaaactgttgaatctgaattaaatgatgttaaaagacaacaacatcattggaacaaaggacataaagttaataccagaaagctttatttaaacttaaatgctactatgctaacgcttaaatttttgacaaatgaagcgaaaaaagaatttttaaaagaaacacaaaaggaacatgaaaatgaataaagtgttttttaaaggttattggtacgaatttgaatgtgttaattgtcataagcactttagaacacttcaaaagaatgctgatgaagttattcagtgcccattttgtaaagtgattccgcagggctttacggttagtggcactaaaaaggagcattagcatgaacaatcataatttagctgaataccattgtgaacattgcggcagagaatttattattgctgaaattggtgatattaaacattgcccttattgcggagatatggacattgctagatatagtttgctaacgataactattgattaaaggagcatgaaaatgaaagatgaaaacggacgtgatattaaattgggtcttgaagaagctagacgcataatggctacagattactgtgtaagatcagatcttgctccatgtggtgagttctttaatgaatatggtatgttgcctcaggagtacataaaggagtatggcaatgaaagtaattgataaaagaacgaagaaaactaatgaggattacaagtatggcgatattttaatgtgttgggatgatgatccagatgaatataatctgtttagaatctcgactttttatgatagttattatgaacaagatcgttgtattgttgtaactatacacagtagtagtgacaatgaagcaaaaacttgggaaggattatttgactcacctaaagaagcggctagggacttaaagaatagttataaccacgctgaaaaagtgaatgcatacattgtgattactgattaacggaggaataattatgtgcgattactgtaataatgaaaaatcaattatttcaattgaagatacatacgaagatgggtacacaggtattgatagatatgaaaatggagatgtttatattaatggaaatgaattaaatttatcttgtgatgtcgaagttacttatgtatcaaagagtagcaagattaactattgtcctatgtgtggtcgtaaattaacggaggaaaattaaaatgaatgcaagagaatttttacaattagtaaatgattcaacttttttcgaagctagatttattgacaaaaatcaagtgattcggttgttattttgtaacatgccaaatcagtcaaagccagatgttgaaattttagtcaacattaaaactggtgacattactattaatcaaactagaaaacttgagttgttttccattaatcaattggatcaagtgcttagccttgtttacctatttcttggtcaaaatagaggattagcttctgcaatgtatggtaataaaactaatactgagcaattttggaaggagtaaaaatgaaagttaaagtattcgatacctcattagaaggtagaggtcatgcaattgggtcatttacccttgaggatttaatgaataattggcttcatgagcataagaatgttgatattaaaagtgttcacatgcaagagtgtttaaatggtcagttgatggtacttgtcatgtatgaggagaagagaaacaggtatcttcagcaacgaaaattcaatctttctgagggtgaagatcctaatgaattcatgaaaaatcattatgttgttaatgtttcaactcttagagatgaggactgggatgaactaattacggtagtaacttacgaggatgaagataatgacaaagcttaagtactacgaagcaagtgttgataatgataaaaagatcatgattgataacaaaatgctaaatttaaagacagatacggcaattaagtattgtcctaattgtgggcgaaaattggatgagaatgcaaaatgtgaaataactgattggttataaatgacagcaaaacaatatttcaatttaacattaattttaatgaactggttaataatcttaatttctttttgttttaaaaatgaaagattagatttctttatgtttatttggaccagtatatcatttacatatttaatgcttagttaacaggagataataacaatgacaggaaaaacaattaaatttcaagcaacaacaaacaattttaaagttaatggtaacaaagtagttttgcaattagatgcagacttgcttactcataagattaacttaaataagcttaaagacattgcttttgatggcaatggagttcaagtaagtcttgaggctgatcaacaggaacttattcccgaagaaaacaaggatagtaagccaatactagttagggatgacaagtaatgaaaactgcactgcttgtattatttgcaattctttaccctacgataagtgtactgaatttgttttcagattataaaaccatgaagtctaacaacgatcttatgaaagaaattcataaaagtaataatttgtttgactctttattaaaagaagttagagcaaatgaagatttaacaatagcaatcaaagacagaactaatgcccaagataattttgtttgggaatctattttaattcttgcacgtcgtattcatgatttggaggacagcaactatgttaaataagcctatttctcatgacaaaaatggtcgtagaatttatcctgattcattaatttatgatgcagttgctaatgaatatttctttccagtcaaacgaaaaggcatttggggtgatgactttatgggggatttttattcattaactccagcacaattaattctgatgaaaaagcatgcaactatggatgacatgaaaataaggatgcatgagaaaaatgaattagacgcaatttttaatactagaggtaagtttgatggaaagtgaacatagcatacaaaagaaaattgaattagttgtctcacaacatcattgtcatatttttcgtgctaacgtcggtaagattagaacacctgatggcagattctttactacaggcttgccgtctggctatcctgacttacacggctggcgtgattgggatcatcaagctttttatattgaagtgaaaaatgctactggcaaaccgcgtcctgatcaaatagctttccataaaatgttgatgaaattcaatgttattcatggaattgcacgaaatactaatgatgcacttaagattgtggagaatggtttagttggctacggatataaatagaaaggaagactatatggaagtaacaattgacgcagatacttatgaagaattaaaagattatgccgatagactgaatgaaccaatgtcaatgattgcaactaaagcaattaaacggtatatcgatagctattagttatgaagtataatagacatattacgaattgttatatatctattatatggagttggttattttgaatttatttgctgaagtaaattattctgctactgctaacaatgttgatcgatttctatctaaacaattgcctagattattacgaagatgcggacatgatttaatagatttatcaagtcctaaactatcatgggcaccaagtcatagtacgggtcacaactatgctgaaacatctatagttagtgttttatctattgaacaagtaataaaagctatatataaaagtatctatagttgttcagaattacataagacagtattaatagataactatatttattgttatgatcaagaacaaatcattagaatgttaccttatgaaaagtcgcaatattataaccgcatcaaacctgattcattgcttgagtttgctgatgcgtacgattactatcaacagcaatgcaatgtggatgatgacaatctcattgaccttcgtgtttatgcatgaatcggaattctatcggaaactgtacggactttcatcggagatcgatcggtggaatttggttcataattgatagtgtcgaaaagtgaatgaagttcgacaaactatcttaggtttttcttcgcatggtcacggttcgaatccgtgatcatgtttaggaacagctgtatttattaactgtcgtatttcaattgatgctgttccatagcatgcgatgacctataatcaaacattaccgcatattatttatgaatacatagcgagcgtgcaaacataagccgagcaatcggctttttgttttgctcaaaaaaagaggtgatcttatgccacgaattagacgttgccgttttcccggctgtcatgctgttgcttatgtgccgaatcattattgcaaaaagcatattgagcatgaagcagaactgcagaaacgtaataacttttatcgattccatagatataacaattcagcaagacaaaggtattacaacaaagtagttcgcaatcgcaatccaattaaagcagagcagaataagttttatcattctaaacaatggaaagacatgcggcttatagttcttaatcgcgactatagtctatgccagtactgtaaaacactaggcaaagttaaagaggacaatgtaatagatcacgttttgccagtagagaaattccctgatcacatgaaagatttacaaaatcttgtcacatgctgtcaggaatgccactactggaaaactagatttgaagaaaagtactatggcacaggattacatggtaaaccgacaaataatccaccggtaactgatgttaaattgattgctaacttatttaatagattacgtaatgaacatgctacagaaaccaaataattggcttctaagcgattttatttttggtgtgtagattacacatgaattaattttaaaaccccccgccccgtatttttgcggttagggagccgcatcagtgccgttcgctcatgtcaaaaagaaatttttagaaaattcttgaaagggggtcgaaaaatgacgaaagttgatctatcaaagccgaacatacctaatcaagcaccgaaatggcttggagaatacggcaaaagattatatccaaaactagccacttatcttaataaaaacgacaaaattttaagagcagatgagtatttattgcagcaatattgttcagcttatgatgtttatcgaatagcattccaagaccttcaagagcatggaattcaacaagcaatatataaaacgtctctctctcctgtggatggtaaagtggtcagtaaggatttccagggatacaaaaagaatcctgcttatcagatgatgtcagactctctctcaaagcttaatgcaattggaagggaattaggtctaagtcctaaagcacgctctgagatgctcgatttgaaggcaccagcaagcaaaaagaaatcagctaaagaaagtttaaaggagttttttggatgatgaactggattattaattatgctcaattgaaatattttgaagagatcgttggtttagtgatttgcggaattgtatgtatcgtttggtttgttttgtggttaattttatggtttaagagtcgtaaataatgaatgaactaataggcacaatatttattttaattgctttatttgcgttgattcaggaaggaaaagattaatgctttatttcaagttcaaagatagtaaatggatcaaagctaaatcaagaaattttgcatctatggtttatgagctaagctttgttagttcttttacaccttgtatgggatttactaataatgaaatttagacgatgatgcaaatattttctaaaaaagattaataaaatgttgtttttgttaataaataggagcttaatcacaaaaaacgtgatttaatcccttattttgctcatttatattgattaggaggtggaatatgcagtgaaaattgatctaactcaaactcatgatgtgggagatgcctaccattcaattgattggaaagaaattcaagaaaaatataatgatccaggaacaaaatattgctttgatgttttagatggcaagaaacaagcaggatacaatattcagttagcttgctttcgccatttaagagacctgcaaaggcaaaacactaaagaatttccttatcattatgatattaaacaagtatatcgacttttaaagttcgcttctatttcgcctaatgttgatactggtgagcctactaaattaatggactggcagaaatttatttttagtcaaatgatgggctggcgtgatcgagatgatgataaacgatttaccagagttattgtctctgtatcacgtgggcaagggaaaacctatttgatggcaattttagtagcttatagttttctaattgagtctttagggctagaaaaccaagattatttagttgcttccattaactacaagcaaactatgaaaatctttggctatattaaatcaatgcttagaaaaattattaatattgagccatttaaatcattagctaaagatgctggcttagagctacaatctgaacaaattattgaaaagaaaactaataatattttaagagccatttctcatgaagctggacagtatgactcatatcactttagaactgccgtttttgatgaaattggtgaagtgaatacacggcaaagaatttctaaaattatttctggtcaagttaaggttaaaaaccatcaattcgtgcagatatctactgcttatcctgatcctacagtgccattccacgaagacgaaaaaatggttattcaagctatggaacaagatttcaagcgtgaagctgatagctatctaggtttaatctggtcacaggatacagaaaatgaagtttatgatcctcaaacatggattaagtccaatccacttttaggcttgccagatcaaaaagaaaatctattgtctggtttaaaagataaacgtgataatgacttattaactggtaatattgctgattttgagaacaagaacttaaacttgtggctgaaacaatccacagctagtttccttaatctaaaagatgttgaagatgctattgaagatgactttaagattgacggtcgtcaagtctatataggctttgactattcaatgtttagtgataatacagcaatcggttttgtttacccttatcaggatgaaaagacaggtgatccacgttggcacatagctcaacacagttttattccttggcaacaagctggatcaattgaagctaaggaaaaacaagatggtattgcttatcgaacttatccggaatattgtacgattacagcacatccacaaggtattattaatccagaacaagtatatagatggctcttagattatgttcagaagcataatttgaaagtcgtcttttttggctacgatcgttttggtagttatcaggttaaaaacattactgagagtttaaatgctaatacagggtggttaattcaggacatagcacaacgtacgtctgaactagctaatccaacaaaattcttacaagaagcatatgcaactggtaagatcactcgttttgatgatccaattgaagaaacagctcttcttaatgctgttattaaggaagataaaattggtattcaagtagataaggacaaagctactttgaagattgatgctgtggatgctttaattgatgcattttatcaagcaatgtatcactttgaagactacggcttgataaatgataagtcacatgaagtagagcgcatgacacaacagcaagtgcttgaatggtttaataatcctgattctgggctactaggaggtgaaacgggtgataattaaaacgctatttaaaaatatttggaaattcttagatgtaatcctttatttattgggctttggctttattgtcatagctctttttttatggaataaaatagcaggttttgcaggtctaggaattgctttacttttaacaggcttattaattgatctactcccacatggtcagggaggaggtgataaataatgcctgtttttaatttgaataaaagcaatgtatcaggctacagcttgaatgatcctgaatttcttactttatttaagaatgatttatctgttagtgagtatgtttccgcagatactgctttaaaaaattcagatattttctcattgatctcacaattatcagctgatttagcactggtaaaaatgaaagctgataaagatagaacacaatcactaattgataatccttctaatttgactaacggttttgccttttggcaagggatgtttgcacagctgctgctagatggcaatgcttatgcctacagatggagaaatatcaatggcgttgatttatattgggagtttttaagaccttctcaagttcaagtgatgctcttagaggacggatcaggattaacctacaacattaattttgatgaacctgatattcaggcaaaagaaaacgtaccacaaagtgatgtaattcatatcagattggtatcaaaaaacggtggtaagactggtgtctcaccacttactggtttagctaatgaattgaatattaaagatgcaagtaatcgtttaacattacatgctctctctcaatctgtggaagcacctgggattttaagtattcaaggcggtggtttacttgattggaagaaaaaatcagctagatcacgtgagtttatgcgtcaggttaatagttctgataatggaccaattgtcttagatgatttggaaacttaccagccacttgaagtaaaaagtgatgtagctaagttactttcacaagcagattggactggtaagcaaattgcaaaggtctatggcgtgcctgattcttaccttaatggtcaaggcgaccagcaaagtaatattactcaaattggtgggcaatatgctaaagctcttaatcgctatgctggtgcggttcaaggtgaattgtctaataaattaaatagtcaaattacttatgacattagaccagctattgatgcaactggtgataactttgcatctgaaattggtgatttatcaagcaagggtattttgtcaggcaatcaaggacggtatgttttgcaacattatggttatttacctgatgatttgccaactcccgataaaccaataattccagcaaatgaaggaggtgaagacgatgacaacagtaccggtcaagggaataatcgtacccaataatttaggtgatatttattcatttctaggatatgaagtgactagccctaatcaattaaatgaggctttgagcaatgctaatggtcaagatattacattagagattaattcacctggtggctacattgatgcaggctcagaaatgtataccgctttaaagaagtacccaggtaatgtaacagctcaagtagttggtcaagcttgttctgctgcttcatggattgcactagcggctgacaaagttgaaatgtcgccaactgctcaaatgatgattcatagagtgagtggtggtgttcaaggcaatgtggatgattttgctagtgcaatgcaatcgctagattctatggatcaagcttatgttgatctttatagcaagcgaacaggtttagataagcaagaagtttaccgtatgatgtgtgaaactacttggatgaatgctaaacaagcagtagataaaggctttgctgattctattatgtttgagaatgatcaagcaccagcggttgtgaatgcttacggagtacccgttttaagtgacaatgcaattcgtaagattaaagcattaattcatgataaaaagtccaatgctgactctaaacccattgaaaataaacaagaagatacagataaggggcaagtcaaaaaagacttgtctcttttattgtggcaatagaaagaagagaacgtatgaatttacaagaattacaaaatgcctggattgaagcaggtaataaggttactgatctctttaataagaaggtagctttacaaaagaattatgaagctgatcctgaatctgtttctgctgaagatatgaagaaggcggctgaagattacaacaaagctgttcaagctcgtgattttgctaagcaaaactatgacgatgctgtagaagctcaaaaggttaacaagcctgctaataaacctgttgaaaataagactgaagaaaagtcaaagaacattgcttcaggtttcaaggatatgcttagaaacccaatgaagtacatggaaaacttatcatcaagttcaactgctgatggtaatgctggtttgactattcctgatgatcaacaaactcaaattaacactttaatgcgtcaatatgatgacttgcgtgatttagtaactattgaaaatgttggtactgagcacggtactagaaacattgaaccattctctgaaattactccaatggatcaattggatgatattcctgatgattcaactaataattcagactacaagtggcaagataaagacattaaggaaggcgattacccatcagttaagcagcttagctataacattcatgattatggtgatgtattctttgctccaaatgatttaatcaatgactcaaacgcaaatattgaagcatggttaaaccaacacattgcacgtaagaatgttgttacctataactcaaagattgttggtttacttcctaactcacaaaagaaggctactatcactaagcttgatgacattattgatgcattaggtgaattggatatggctttatggggtggcgctaccttgttaactaacaagtctggtttcttgaccttagctaaggttcgtatgtcagacggttcacgtgccatgaacgttgatccacgtactcaacaaaccaccttcaacatggatggtatgcaatacattaacgtacgtgtggttgaagacagataccttcctaacaacactactgttggtggcaagtatcaaagccatccattttactttggcaactttaaggaatttattcacatgtatgaccgtcaacaaatgtcattgcttacttctaacattgctgataaggcatttagacgtaaccaaactgcaatccgtgcattgaacagatttgataccaagatttgggatgatgaagcgatgatttcaggttcatttgataaggttgaaagtcaaccaatgcttatgcaagcagttactgcaccagcaagcactactccaactaagtagtagaaagtaggtgatcaataatgaccacttatttaacaattgatgacgggcttaagcgctcacttggttacttacctgatgatgatgcattggatttttcagatgaagaacgtatgaaagcaacactgaaaggcgctgaaaattacgttcaaggtgcaatcggtgatgatgctgatgaaagtttttataaatctgattcagtgtttgagctgtataagttagctgttaatgcaattgcaactaactggtttttgcatccctctactgctgtgtcatcaactacagcaaaacaaatcataggtcaactccgtgggacttatgatgaatcaaaggtggtgaatgacgatggtgcaacttcaaagttgggacagactaatttataaaattgtgtttggtactgttactgatgatgaagatgacaatggtattcctactaatgagtttaaacaactcgctagacctacactctgtgggcgttggggcttaactacaggtcagattgtacaaaataaaggtcatcatcgtgatgattcatttattgtagtcattcatcacaagcgtgattatgatggtatcactcatgcaatgcttaacaataagctttatgaagtgagtgatattaatcctgatccatttcaaaatccaactgcaggagatttgatcactctcacacgagtgactgatcgtgatggttgatttagataaaggcttaaatgattggctagataaaatcactaaaaaagtgaaattatctactgatcaaaaagctgctattactggtgaaggtgctaagacttacgttgaagtgcttaaaaagaatactccaatgtctcatgcaagctatgcacatgcaaagtcagctggtcatggtcgtaagtccaaacatatgaaagatgccatcacttataaggctggttatgaagtcaatgatggtaacactggtgatacatcagtaggctgggaagataaatacaatgcattagtcgcacggtttgttaatgatggaacacgtgatatgtctcaaaaagaaatatcaaatcttcattttaaagatcatgcagaaaaagaagctgcagatgcagtactaaaagctaatgctgaaaaattcagggagattttagataaatgactactgttgcaaagcaggtagttgatcttcttaattcctccaatcttcctaaattgcataaagcctactcttttgcggttggaactagcgaacgtactcctaaagattctgtggatgtactcgttagtgaagtggattttgattttacagagtcaggcagtaaccaatacacggaacaaattcaacgtttagcaataaacgttttttatagtaaaaaaacaacagtagacatgaacaattttgaacactcgctcatgtctttttttgtagctaatggttggcaaattgtagctagttttgcaggtcacacatacgatcccaattctggtgaaccaacaattagtttccagataaaaaggagaattacatggaacttcaaggtttaaatgatttacttgttttcaagttcgataaggacggtaaatttgttaccgatgaatcaaagggtggtttgaccaccaatattggtaaagatggtgtatttaaaattgatttggaatccagtaaaggtgctactcaagctaacatcactggtctttcaagaactgcacaagctgtttacggttctaacgcaaaggctgaacaacactttggtgcatatcaaattactggtactttcggtgctaacgacattccacataacttctatgatgcaatcgtaggtcttgaaaaggatagcaagttaggctttggtaacatggctaaagatagtactccacttgcatatggtggtgttattgctcactcatacaactcaaacattggcgttgatctttactttgcattgccatacggtaacttgactcctggtggtgacttaactatgggtactgatactgaaaacccaactttagtacacgatacattcactcttcatgccgctgcacgtccatcagatggtttagtttacgaaaaattctattcagatgaagatggatttaactttgacaagatgattacttggatcatttcaggtactgttgctggttctagcactgaagacccgactcacaagggatccgatggcactgcatcaactactcactaataattaattagcagggtgggtagtggtggcaaattaatatcaatatctttgttaggaacggtgtgaaagccgttctttttctttcgaaaggaaaatcaatcaatgtcagtaaaaatcaatggtaaaaagcttcatttaactacttttgaagttgaaacaactgtaaaaaatgttcgtgcatgtcttaaggcacaaaagacttttgcagaattgtcaattgcaatcaacaaagttaaagatgatgatgatcaatcaattcttgatgttttaatagcacaagaaaatcttttggatgaagaagaaaagtttttaaagaatatccttcatttatcagatgcacaagtagataagattgaagattctgatccaggtgatgtcagtgaatttgttactgatttaattggaaaaatcttacaagtagacgactccaaaagcgacaacgattaatgatcctgatccagtacatgcctatgaggaaatgctggaagattttgattatcaagaacaacaaatgattgttaatgctcatatgtccctagaagattatgaaaacactgattattaccgtcttgtggaagtaatgagtgcaagaccaaaggacaaacgtccaatgagtctttgggactttgcagcaagtttagacaaaacagaaaggaggtaaataaatggcaggaagaataccagttggtgcactgattacagatattaaattaaacggtgatcagcctgtaaaaacgttacgagaattaaggcaagctgtatctagtactaccagtgcatggaaagctcaagaagctgttttaagaagtgctggtaagactactgaagcggctgaagctaagtacaaaggcttatctgatgctgtaaaaagtcagcgtagattaattgatggcttagttgaaaagcaaaaatctttaaagaaacagcaagaagaaattgatacttctacagataagggcaaaaaagcttatgaaagtatcagtactgcacttcaaaagaatgctactcaaactttgaaagctactagtagattagaatcactgactaagcaacaggataaggctaaaaactctctcacttactacaagtcaggattagcagaagctcaaaagactttaaaaaccactacggctgtttcaaaatcgtatgttgatcgtttggaatctgaaggcaatcattataaagctaatgaagctagaatttctggttatagaagttcaatcaataatttaactaagcaatatgaaattcaatctcgtgaattaaaacgtattgctagtgaagctggtgctaccagtgaagcttacaaacgtcaacagatcagagttaatgaaacagctacttcattaaacaaagctagattagctgttagtggtcttgaagaagaacaaagaaaaatcaatcctacaccatgggatagattaaaagctaaaatttctagtgttaacaaaaaaagtcaagaaactcatagaacattgcgtgaagtgtttatgggatctgcacttggtaatgctgtaagcaatgctgtatctaatttaggatcaagccttaaatctgcttatacagagggcatgaacttgaatttagccattgctaagatcaatggtagattcaaaggcatgggcatgaacactagacagattcaagccctggataagcaaattggtgagttaaagtctaacactaatttagctggtgattcagcatccgatttacaggctcacatgcttaactggtcaaccattggctttaaaggcgctatgcaaatgtctaaagccttagctggtgtaggtgatagctctaaaatgactggtcaacagattgaccaaatgtcagcagggcttcaaagaattggctctactggcaaagttacttattcctccttaagtagaattaccaaagctgcacctacttttatggctacacttgcacgtggtgctggcatgtcagagggcaaacttagagcattgcttaaaactggtgatgtaacacaaaaacaattccaaacttggattgctaaatcatctaagtatgctgatgaaagctttaaaggttatggtcaaagtcaagctggtgctttaaaagctatgactgttgctagacaaaaactagaacaggaatttactaagccaatctttgatgctaagactagtggcttgcaagccttgaagaatatcatgactagtaaagaagttatgagcggtgctgaccagctgggtaaagcagtatcaaacgttattggctacttagataagcataaaggtgatattgtagctatcactaaaaatgttatctctctaggcgtggaagttggtaaggcagtttggaaagactttgcagctattattcaaaacattggtaaagcacttggtattgttaaaggcaatggcaaggattctggtagtgcattacatacacttgctactgctacaggtgatttagctaaaaataagactgctgttaaggctatatctgatgccataattgcaatggtagcaattaaaggcatccgtaaagtcagtgatggtcttttttctattggtaaaggtgctgttactacttataaatcagttaaagcattacacgatggtttcaaaggaattgaattagctaaagatgctactaaaggtgaaaaagcttgggctaagtttggtggcgttctatccaagacttttagcggctttagaaaagttggaagtaaaacttggactactgtagaaaaagctggcatcaaagcttggacaggtattgaaaaaggctgggctaaagcaagtgatttaggtacaaaagctggaaaagcaatagctaagggttttagagctacaggaaatgtcttagcaaaggcaggcaaatggagctggagcaaaattaagtctggctttaattttgcaaaaaagtttggtcaagaaataggcaaaaagatttcagcaggaattaaagctactactaagttctctatgggtaagcgtcttgctactggtgctttagcaggtactgcagttgctacacctgaagtgatcaacgctgttaaagatcgtcacaatgctaatgctagaagtcaagacattggcggtgctgttggcgctgtcgctggtggtacattaaccagcatgattccagtagttggtccaatgctcgctcccattggtgctttacttggcaaatatgctggacgttggggtggtcaagctgtcaataatttcaccaaaggctggcaaaagaacaaaccgccaaaaaaattctggtcacttgaaaatctcggctattctgcacataacatgtggaatggatttactaagggtgtaatcaataccattaagtggtttaagaaaaactggaaagaagtcggtttttactttgtaagtccgcttgctggtgctattaattcactttacaaacacaattctaagtttaggaaatgggtgaacagcttagttaaatcatttaaaaatgcttggaaaggcattgggaaatggtttggtaatgttggtaaagctgtgcaaaaagcatggcgtggaatgactcattggtttagtaacttaggcaagaacatggctaagggacttaagtcagcttggaaaggcatgtctcactggtttagcggcattgctcgtggcgtacgcaatgcatggcattcaatgacagcttggtttactagacttggttctgcaatgtctaggggactcaaagcaacttggagaactgttactagatgctttggcggtattgctaaaggcgttcaacatgcatggtcaggaatgtctcatttctttggccatgtaggctctgcatcagtaagactgtttaagtcagcatggcatggaattacttcatggtttggtggtattatcagtggcatcaagaaagcatgggatgatttctttggtggtatcagtagtactgttaagttcattggtaaattgctaggtggcaaggttaaagtaggcaatgttcacttagctgaaggtactgattggaagaagaaatacggttatccagccatcttaaatgatggtcatgattcgccagctactaataataaggaaggcattttaaatcctgatggctctgtggaagttcaacagggtgtgaatgtaccacgttggatctttccatggcaagatgttatcaatgctcgtgatatggctaaattgtttggtcgttctgttcaccttgcaaatggtactgttgatttacatagtcttgaaggtaagagccctgctaagattttagttaatcttactaagcttcttaagaagaaatacgatgaagaccgtgtgcgtcatcaaaagcaaaaagaacgtcataacagaaatgatgcttctactgctaatgagcgtaagcgtctgattaagcatgaacaagatgacaaggctgatagagctaaagtcgctaaagaaattagagacgctctaaagcgtggtaaaaatacccaaggcttgattgtacagttaaacaagttaaccagtcgtattagtagagaccgtaaagccgttgctaagactaatccgcaccacggtgaaacactcgtggatgaaggattattacttggtgctaacagtcgaattggcaagtccaagtggatcagtgatgcactctttaagaaacttactactgctcctaaaactaagaagaaaactaaaaagcgcaaaacaaagaaacgtaaatcaactagaagaagatccacaagaacatccacagcaagacgttcatattcatctggttcaagtcgtgtttctgtaccaaacgttagtgtttctagtgcatcacttaaaggcttatcttctaagtcaatttctgtaactgctaaggtaaaaggatctaagcagatcaaagcccttgaaaaggctatgaagcgtattaagggtggcactcataaggttactgtaaaaaccaagggtgttaaatctgttaagtcactctctaaggcaatcaagaagatcaaaggcaaaaagagtactgttagtgtaaaaacaaaaggtactagccaattaaagtcattacacaaaaacattaatactgttgaaaaacgtcttaatgttttagctaggactgctaaaaaagataagtttggcgaacaaatttctaggcaggctgaaaaggctgttaagtcactcgaaggcaaaggtaatttcaccaagaaaatctctagcatgtctaaagcgactgttaaagatttcaagtcaatgacttcaagtgttggtaaaactactgataagatcagaaaatcaactgaacaagactttagtaatctttataaacggtcttaccaatctgttaagagattgcacgatggtgtaatcaaattaggcactgctactgctcgtggttttggcggtgcaatgcataaaatggttggttatgcatctgattcaatgcgtggcacaatcagacaaatcaaccgtggtattcgtggtattgatgctgtattaaagcaatttggtggtaatagttctgttattaatccagtccactttgctaagggtactgatgcaaatggtcgtttaactcatgacactttagcagtcgttaatgatgctcaatctggtccacgtcaagaagctgtagtaactgatcaaaatgacattattattcctcatgggaataatcgtaggatgctattgagaaaaggttggggtgttcttaatggtactcaaactcaatcactctcacttccacactttgcaaatggtactggcattagcaagaaagaacttagaaagttagcagaaaacagcttaaagcactttgctgatagctttaaatcaatgtttaccaataatcttgatgatgttggttctaatttaactaaagattctactgatttgagtaaacgttctggtactcactttggtaatccatggtctcaagccatgtggacggttatcaataaagccattggctctggtggtggttcacgtgctaagttcttgcaatatgccaaggatacttttgaccgtgttaagtatcaaatgggtgctgcgtcaaggaccttatctgactgttcaggtatggtaatgcaggcacttagacattttggaattaacattggtcgtactactgttgctatgcaggaatcatcaggtgttcagtatttaggtaaaaacttatctaaaacagagcctggtgatttggtcatttttggtcatggtactggtgcagctggtcacgttggtattatcaacaatccaagcaaaggcacaatgtttaatgaaaccccaccttatgcacgtatcagtagaatttctgatgcaatgtctatgggctatggttactaccgtgttaaaggtcttcacgatcaagctaagcatcaacctaagattaagcctagtttgttagctttggccaaacgtgaattaggtggtaaagcacttaattggattagtgatcatttatccgaaaatgaaggtgcagttgctggtaagcctactggtgatcatgctcactggatgaaacaagctcatattcctgaaagagattgggcagatattaattacattgtttctgctgaatctggttggaatccacacattgtcaaccctagttcaggcacttatgggttagggcagatgcaaggatataacttacattactacactaaacacggtgctaaaggtaatgctattgcccaactgatgggtatcatggattatattcatgaccgttatggtacggttactaatgctgttcgatttagaaaagcacataattggtacgcaaacggtggtattgcaagttcgccaagtatttttggtgaagcaggacctgaaatggctgttccactgattccaagtaaatccacgagagcgtgggaattgattggtaaagctgtaggtattcttacagctaacagcaatttaagtgctaaccaacaacgtatttctaataaagatgaaaaagatgagcatgacttattaaaagccatacttttagttttgcaaaaaatgagcgctcaaagtcgcgatattcatatcacacttgaaactcctgaaggtcgcaagctgtgggagttagttgagccgttctacaagcaagatcgtagacaagacatgattaaagaaagaaggggattaagtgcaagatttagatgataatgtgaagcttgtttttcaagaccatgcttcaacagactttggtatggtcgttcaaaagccatgggacttgattcatccaacacctgacattgatcctacacatataaaaggtagaaatggtgatttcttacaaaataaccaaagctatcaaaatgtgactgaaacctttaatcttgaaattttacgaccacctgaacgtggttggtttgattgggaacgttctgtaactgattggttatctgctccgactgatcctgatgggcggatgaaatatcaatatcttagatttactgctgatcctaactatgtattcaaggcaattgtcaaagatccgtttactgttactaaagatgtaactagtgattttgttggaatctgtgctattcctttctactgtgaaccgtttcaatacagaattgatggtattgcttatattccgctccctgatagcggtgtggtagttggtgaagaaaaatggtctgctattccagattggcacttcatagcaaacggtagtttcacgctttacgtcaatggcttgccttacacgtttgagaatatggaaggtgaattttggcttagtggcgctactggtgatacttatgatgcagatggcaatctatacaatatacaaactcattttcctaaccttgatcctcctaaattgtggaagggtcagaatactatcactgttactgctgaaactggcactactatcactaaagctgaatacaaaccaaattggaggaggttgatctaatgaaattaactgtaggtacaattcctgaagttaattatggtgactattctgatttgatgacaatgccacacctttatgacagtattgctagtgattttactagtagcggtattcctcttcctgatgcaattgattgtcaggttaatggcaattctaatcagttttggtctttaactatgacttatccaagatcaggattgcaccaaaaggaaatccaacctaacaaatggattatggaagactgtgatcctaagcacgtacatcaatggtttaaaattatccacattactcctgaattagataatgtggtagttgaagcagagcacattgatgcactgcttgctaattcaaccgttgctgatgatattcaactaaacggtgctactgcacaagatttaggcaatcagattcttaatcaaatggaaccacaaagagagtttaatttttactctgacaccaatgatgtacgtcaagtaaatattccaggtggtcagcaagcaagtaatttgtttattgatcctgatcaggaaggtgatactgctacacagtcagttttaggactgtttggcggtgaatttgattttgataattggaatatcagacattcaaaacgtattggacgtgattctggtattaaggttacctatggtaaaaatatcaaaaccacctttagtcaagataagaacattcagaacatgtatactggtgcggtatttgtcgctaagtatgtaccaggtcaagcaattgcgaaaaatgattggcaaggctgggctacatgggaaagtacttatgattcagtaggtatcacttacatggctggcggcaatatcaatatctatgattgtcctgtagatggtcaaaaaatcattggtactttgcaaaatgggatgaaactgcacttaggtcagattgttaatgatggttcattcactcctgatggtaaatatcaaattaacactgttaatagcgatagctggtatccaattgcacaaactgatggtggcggctggattgattctaagtggattaattttgacacatcaggtgcttatgcaattaacaatgtatcaggaactgtaactgttaagagtagtaatccacttgatagtgaaggtgtaggttctcgcgtaactgtacatggatcagctgtagtagcttacggtaaaggaaaatcaattagagtattttactcacctgaaattggtcctgatcaccatcctgttaagtcactaggtcaagattggactgttaaaaatggtactgttattgactatgacatggttgaacgtaactcaaatggtgatctatggtacagaatcggaccacatcaatggttatatggtccacacttgtcacttacacaagaaggaagctaccgcatttatagcaattctggatacggttatgttaaagatggcgctgttaagtatcatttcaccaaagaccacaagatggtgtcatctaatacaactgttattaaacatagctcacagaagaaagcttggaaatatgtaggcaagggcaaaaataagcataaagtaggcaatggctcttattggaaagaaaaagaaaagaaggtcaaagttaccgctaaaaaagggatgtctacgattgataagacaattactcaaggcggtaaaacctacatgcacacaagaaatggttgggtagaatctggttcaattaactacactaaagatgggtcagttaaaccacattcctttgatgactttattaataatcaacttaaagatcatagcaaagttgaaatctatgcaacacctgatagcaagaatgctttaaactggtcaattcctaatggtaagacatttcaagtagttaatggtcatgaagctaaatctggtgatggtaagacttacattgaagttacttatgaaggcaaaactggatggctttgtgaagatgacattgatgataagagttctactattacatctgctgatgctgacaaagataattcagcagatactgacaccaactacaatgcaaatgttgatcaatctaataaggaagtaaccgttaaagttggtccgctctatgctgatggttttggtgtaaatcctaacattgatagcgttaatactgttgatattagtggttacttcaaacatgatgatcaggatttaagcggtcagcaaagtgatggtagttttgttgctacacaagctgatattgatcaagctactgaaattggtaagaactatctaattgaacacagatatggtcatatgcaagttcaaacatcacttgattatcaagacatgtcagataatgatcaggactttactcaactaagtctttatgactatgtggatgttagttttcctgattatgaaattactgaaaaagctgaagttacagctacaacgtgggactgtttagcccacgtttttttaaatgtaactttaggtgatttgccaactagctatgaacacctacttgttcaagctagtgaagatagaactaatgaaaaaatcacttccacacgtcaagccattgccagatcaaatagttttattggtgctgttcaggaagctatgactttgcaaggtacatcccaaactcaagcatgggagaccttaatggcaaagttaggtaatgctcactataaaactgataaagctggcaagaagaccttagtacttgatgaatcagttaaagattttgctaaccacatgcaggaaatggttactaacatagataactttgataattttctgaagtctggtggtggcggaatgcttgaacctatttccagtgatggctctaccagttggaataacgtcatggcaattagagctaaaaacaatgatggttcttatatggaatttaatggcttaggttttaatttccatgatatttatggcaatccacatgctttgtttggtattgatgattcaagtggtgaagtaactggcaatttctttgttgatcaagctcatatccctattttggatgcatcacacattaagactgatacaattacaagtttgggaactattaacggtgttttacacgttgaaaaccatggcatttcaattgcggttggagatgccactaatttactaaatcctagtcaggaaattggtggtttgagtttagattctccaaattatactttgaatttgggatctggatcagtaaatattcatgataaaaatagtggtgctattacacacattggacctaatcaagcacagattggtggtaggaatgttgttgtaacaagcagtgatcaacctgtattaggttcatggattaagcaatattggcgaggaccaagtaagtattgggatttataaaaatgaatacattagaacaatttgtagcaaatgaattgggaactgttattgcaaaccaatccattaaaatagcgaaactagaaaaagaaaatcaaagtttaaggttaagaaatactcaacttcaagaaattcacagaaagaaggtgaaagagagtgagtctaagaccgataacattaaaaacggataaatcaataacccccgtgtcagacgacacgagggttttacgttctactgaaaaaggtttagtgctggacgtaacaattttaaatgaagatgattctccctatgatttaactgataaggatgtttcattttcagaaattaaagagagtgatcgtgtagttgctgatgatggtactggtgagcaaagtggtaaattcaacatgattgatcgaactaaaggacactttagttatcaaatgactcaccaatgttatacagccagtggcacttgtttctttcaaattaagcaaggcgacactattgttgatactacacaagatttctattttcaagttaaagttgatccaactgttaagcctatcaatgatagttatgtaagtagtcttattgctatggaaaaccacctgctaggtgctactcaaaaaacacaagctactattgatcaattgaataaagattcaagtaatgcacaacaacaagcacaagcagtacttactaagattaacagtgattttactgattactctattaaatacaataagctggcaagtgattgggctagtcaagaacaagctattcaaagtaaagctgatgcacaattagctgatcttaaaaccagtaatcaggctgatattacagcggctattaagtcaatcaatgatcaacgtgatgcagctcttgaagagttgagtcaggaaaagacaaaagaattagctgacattcagtcagattacaactcgtggaagacttccacagttaaggatttcaatgatactgttcaaccaattaaggatagtattagtgctaacgatcaaaaacttaccactgtaagtaaacaagttgatgatgctgtagcatcaatggactccttgaaacaacaatttgataaggtagacttttcaaagtttgttacaggggacaccattaaaaattactacactaaggaagaaactgacttaagacttgcgcaagctggtaaagttaaaacagttgataacattcaacctgataattcaggcaatattaatactgatcactttactaagtctgaaacaacacaaaagctagccactaagctgtcgtttgtcaagtgcgacagtcctcaagcggcttatgatgctagtttgaaaccagcagatgatggatcactggtaattggcatttatgatcctgatgatggaccaaccagtgctgtaattggtgataagacaatcactattagtagcttgtatgaatcactacagaacttgcaaactcaagtgagtggcttaagtggtttgcaaagcgctgtggacggtaaagccgataaagcaacggtatttttaaagactgatgcagacagcttaaagaatcagcttgaatctgaaattagcaacgctggtaagcttaaaactatcactgtaaacggtggcgcaaagataagccctgatgatagtggcaatgctaatatcactgttgatttatcaagcaaggttaaccaaacggatctgaataacactaacaacagagttacagcaattgaaacaggatatatgaaaaagcctaccgtaattagtaaagctgactacgataagcttgctactaaagatccaaatacgttgtatgaaataacagaataaagaaggtgaccgtatggctttaacgataaatggcaaaaaagttctaggttatgctctaggtgaaaatgagtttcttaatggaaatggagcagaaaacctaaatattttttatattggtgatgataataacagtgaatggaaccatcaatcttttactattgatatgacaaaatattttagtcaagctgatgcaaagtattcggatgttcaatattaccaaattattgtaaaggtattttatcaagatgctgacaataatactcttgaaaacaattttcgcacaccgttattgaaacgcggtgaaataaataacaagcgaagtgataatgaaggcagtcccggagctatgtcagtttggtttacggacaacaccacattagctgtccgtacaaaatccgattatgacgacactttaggctattcatatactaatctggtattggcggtgtatggctttacttctcaagatgtaggtgctggtctatagatggcagcacccaatagatattcatcgaagaattaaagctgtcgttcatgataaacgacagcgtacttaagcgatacattcgcttattttttatatcttagaaaggagtttttatatggctaatatttttgcacctggtggtcaagaattggcattagcaaaagacattgttcgacctaatttgcttgctaattctaaaaaatgtgagataagaacaccagcaggaaatatacagtttggcaaattcattaccctaaaccctaataatttaggatcaatatatttaactgatgcagcttcaaataaaggtattcacaaagacgcaactacttatttgccaatagagcaaaacacatattatgctcaaacactatggtttaccacagatgctcaagttattcttagtaattttgcttcaaattacatcttttactcttcaaatggctctcgatatctcttgtcaggcgtagaagcacatcaaattgttggcaatcaatataaagtatctggttattttaattccaagacaaatagcgactttaatcttggctatattggcaatttttctcaatgtttgaaaatcgcatcaactgctcaggttagatttgatgctttaaaagtagaaaaaggtactgaatcaacagactggtgtcctgcctatgatgattatgtaatgcaatctgatttagatgatcttaaaacacaaattgagcaattaaaatcaaaataattgaagcccacgatggctattttttatgcaaaaagcatagttaattaacactgtcgttgatattgaacgacatacttatttaaagaaaggaaaataaaatggcagaattaaatgaaaatacattttggatctctggaattattaatggagaatacagagagtgtgatggtccatataccaccacaaaggatatgagtgataaaggctatccttatgtaactaaaactccaaatccaaactttacacatcaaaagtatgactacacagctcatgaatgggtagacacttcagatgatgctttacttcacactgtggaagatgtaaaagaggctgttactgaattaaaatcaaacagtcagtcaaatactcaatcaaatgatcaacttgataagaaattagataagcttactactttggtcattatgtcaaatgttcaagtaggtgaaatcagaaaagaattacaagcggttaagactcaaaaccagtctgcagctgctactcaacctactgaaccaacacaaaacaccacaccagcaattgaaggaggtaataagtaatgtttgagatttacaagtttgaatttgataacgattttatcagtcaagatgaattaagaagttacattgatatgggcttaattactcaagctgaataccaagaaatcgttggtggtagcaatgaagaagctaaaccagtggaaggctaaattaacaattagaaattgtgaactgttaattggtctttttattttaggtaaaggtgtttggctgtttcatgacagccactacttcatttatcctccacagtttgagaatattgaaaacagtagatacattgactgcttcctaattttgttaggaatcttgttaatgctatctgcttttttagttccgtatattagcaatactaaatacaaaatcatgctaattattgccagtaaagtatttcttgtaatagttggtattgtttgtatggttttagcattattgcaattaacgcatggcatctttactccattctatcgaatggggcattcagcatggggagatctgataatttttggatttgtttatctaactgcttgtgatgcctgaaagtgggtgtcatgagtgaattggggatacattattacagcaattggtggtgtgattagcgctataacgcttttttacaaagcttttgatagtagtaaacaacagtcactcaccacactgctacggcaaaaagatgaagaaattaagcagaaagaacaggacgctgaaatctacagaagaaaatggctagatgccgaaaaagacaatgatgaattaagaaagaagttaaaaaatgacgattaatcaaatcatggatttagtaatcacaatttcaagtgtagctttggtagtaattgtagctatctatactaaacataaagtagaaattgaccgtaaagctatgcaaggcaatgaacttgctaaagctgaacaattagtggctaagaccgttgaaccacttgtatatcaagctgaaaaatcaggtggtgatggtgatactaagtttactcaagtattgaacactgtacttggtattcttgatttagctcacttaccacatccttcaagccaatttattggcggtgaaattgaaaagagtgtagctgctatgaaaagaacacaaaatttgattgatactgtagaagataagccagcagacgaaggtaagaaggctgatactaatgcttaaaatgtgtgacgtgtattccgatagttctcgtagttttgctacacaatcaggtacagatattactatgattaaggcaacacaaggaatgtggtacgtaaatcctgaatgtgacgtagattaccaagcagctaaaaaagcaggaaaacaattaggaatttatcactattgtgaaggtggtaatcctgaaaaggaagctcaatacttctatcacaatgtaaaaggctatattggtgaagctgttcctgcagttgattgggaaagcaatgaaaaccgtagctggggcaataccacttgggtgaaacgttttgttactgaatttcatagacttagtggcgtatggtgtttagtttatgttcaatcatctgcattaaaccaagtagctaactgtgctaagacatgtggactatgggtagcatgttatccaagtatgaattggaagagctggaatgtccctaatatgaacgttccaacatcaccatggaaaacttataccatctggcaattcactggtgataacatggatagaaacttggttaataccactgttgaaggctggaaaaaattagctaagggcagtaagaccgtagctaagaagaaacctaactgggttaagaagtctggtgagtttatcttaggtgaagccttagcaattcacaaagaaccccacattgattcaccagctatcgctaagcttagcaaaggtagcgtagtgaagtatgatgcaactttgcaaggcccactaagattgtggttaagacagccacgatcaaacggtaaatgtggttatatcgttgctaaagacaagtatggtaaagcactaggaaaatttagataggaggaaactccaaatatcgtgcaataagccaccttggggaactatgtccctggggtggcttttttgtgttgtcactttatataaggaagaaaaaataatttactgttgcacaaatgttgcacaaaaggtttttaacttaaatttaggtaaaaaaataagcttgcaagatcagtgatctaacaagctcttggtctattaggcacgagtaactttaccagactttaaagccttggttgaaacccatacgcgctttggcttaccgtcaacaagaatgcgaactttttgaaggtttggcttccaagcacgacgagttgagttcaatgagtgtgaacgtttgttaccgaatgtagtcttcttacctgttacgtaatcttttgccatttgctaaacctcctttaattgtgatgtcatacttaattagattatcatatgttttcgcgcaattcaatactaaaaggattttttcaggtgtattttaattattgattatgtcgttactatgataaaataataaacgtatatatagataataagacggaggacgaaacatggctgttaagatcaagacaaaagatggtttgattgatatttcaaacggtgtaatcgcaactgttgttggtggcgcagctacgtctaactatggcgttgtaggtatggcatcaaagaatgccattcgcgatggatttgacgggattcttaatcgtgccaattataagcgcggtgttgttgtcaagtcagaagataacgaaattacggttgatgtgtacattattgttggttatggtttgaagatttctgaagtaagtaagaatgttcaagatagtgttaagttcaatttgaagaatcaattaggaatagacactaaggccgttaatgtcattgtacaaagcgttaaggtacttgacgaataacacaggcggaggttttaaatagtggttttaaatgagatagatagtaagcaatttagagatatggtacgtgttgccactcatcgaattggtaaaaatgcggagtttgttaactctttgaatgttttcccagttcctgatggtgatactggtactaatatgaacttaaccattgaaagtggtgctaaggctgtttcggaaaatccaagtactagtgttagtgatttaactgaaagcttggctaaaggtatgctaatgggtgcccgtggtaacagtggggttatcacttcacaattattccgtggcttttacaaggctacccaagggatgaagaccttaactgcacaggaattagcaaatgctttttcaaatggtgttgctactgcttataaggctgtaatgaagccagttgaaggtactattcttactgtagctcgtgttgctgcacaagccggtgctactaaggccaataacaccgacgatgtaactgaagtaatgaaagctgtagttgaaggtgctaagaaggctcttaagtcaactccagatttattgcctgttttgaagcaagttggtgtagttgactcaggtggtcaaggccttttgtttatctatgaaggctttttggaaggcttaatgggtgaaaactttgcagatcaatatcaacctgacgaaaatgaaatggatgaaatgatcaatgcaatgcaccaccaatcttcagttcaaagccaattggctactcaagatattaaaaatggttactgtactgaaatcatggttgatcttgatgccgatgtgccaaataaaaagaagtttgatttggaagaatttagaaagcacttgtctggcttgggcgattcattattagctgtttctgatggtgaaattgctaaggttcacgttcatactgaacaccctggtgatgttttccaatacggtagtcagtttggtcaattaggcaagatcaagattgataacatgagaatccaacacgaaagcatcgttgaccaagatgaagaacaacaagaagcagttgattttgcagtgatcgcagttgcttcaggtaacggtattcgtaagttgtttgaaagtgaaggggtaaaccgtattatctcgggtgggcaaacgatgaacccatcaactcaagactttattgatgcaatcaagaagtctggtgcgaagaaagctattgtcttgccaaacaacggtaatattgttatggctgctaagcaggctgctgaagttagtgatattccggttggtattgtaccaactaagactatttctcagggtttaaccgcaatgctttcattcaatccagatgcatctgttgatgaaaatgtggaagctatgacagaggacttagatacggttgtttcaggtgaagttactcaagctacccgtgatactgaaatcgatgaagtagaaattcataagaatgactacttgggaattgttgatggcaagattaaggttgacaatgctgatttaattaagactactgttgatatgattgaaaagatgctggatgaagattcagaaattatcacaattatgtttggccgtgatgctagtgaagagcaagcacaagaagtagttgaacaacttgaagccaaacatgatgatcttgaatttgaaattcatgatggtggtcaacctgtatatcacttcttagtatcagttgaataacaatgattgataatgcattatttgctcctgtcacagacttaaagggtgtagggacaaagactacagctgcattaggaagcttaggcatctatagtatttatgatttgcttttttactttccttttcgttatgacgaattacaaacattaccgttagatcaaatcatggatggtcaaaaagtaatgctaaagggaatagtagccactgaagcgtttgttagtcgttttggctataagaaaacgcgcttaagtttcaagatgagaattgaccatgatgtgatcatggtcaatttttttaatcagccgtggttaaaaaataaaattgagatcggacaagaagtagctatttatggtaaatacaatgttgcccggcaaagtttaacggcctttaaattcgtagcagccaaagaaaatgatagtggtatggcgccgatttatccggttaatcgacatgttaagcaaaaaaaattagtagatctaattaatgtggctattgacgattttattgatcaagtgcaggatattgtttcggaaaagttgcggcaagaatatcgtcttttaaaagaccaagtaattattgaaaaaatgcaccaccctaagaatagtcatgaggctgaactagctaagagaagtgcgatttttcgtgagttttttatttttgaattacaattagctttattgacccgtaatgatggtaaacaaatgggttatgcaaagaaatacgatctgacagaaattgctcaattaactaaatctctgccatttgaattatcagatgatcaaaagcatgtggttaatgaaatctttgctgatatgcattctgatggtcaaatgcggcgacttttgcagggtgatgttggttctggaaaaactgttgtagccgtttatgcgatttttgcagccattacagctggctatcaggcggctttgatggtgccaacagaaattctggcaactcagcatttcaaaaaaatcgatgaattgttgcgtcctttaggtgtgcgagtagctcttttaacaggcaatacaaaaacactggagcggtgtgagatctaccgtgaattaactgatggcacgattaatgtggtaattggcactcatgctttaattcaagatagtgttatctttaaaaaattaggtctagtcattattgatgagcagcaccgctttggtgtaggtcaaaggcaagctttgattaataaaggcgatcaaccagatattttggcaatgaccgctacgccaatcccgcggacgctggctttgacagtttatggtgatatgacagtctctgaaatacatcatttaccagccggaagaaagccaattatttccacatggaaaacaagtagtcaaatgaaggaagtctatcgacaaatgcaagagcagctaaatcaaggctttcagatttacgctgtgacaccattgattaccgagtcagagacgttagacttaaaaaatgcagaagaattgcatgaaaaattaagccatgattttcctaatcacaaggtagtcctgcttcatggtcaaatgccaggtgcgcaaaaagatgagattatgactgcatttgcagctggtgagatcgatattttagtaactaccagtgtgattgaagttggagttgatgtggctaatgccaatatgatggtgatttataatgctgatcgttttggcttaagtcaattgcaccaactgcgtggtcgaattggtcgaggacaaacacaaagttattgtgtctttctagctgatcctaagaccgattcaggtaaagcaagaatgaaaattattgcgtcgaccaatgacggcttcaaattagctgaagaagatttaaagatgcgcggtgaaggtgatttgtttggtaaggctcagtcaggattgccagaatttcgtgtgggtgatgtagtaaataactacaatacattggtcgttgcgcaaaaagaagcacgagctttggttgcggctgatcctgatttattagatccaggacataaggcacttaagcaagtgctagaatataagcaattagagcaaaacagaatttagaaaagattgtggtgaatatatgagaacaattgcaattgatgcgatgggtggcgaaaatgccccagatgcaatcgttaaggcggttttacaagctaaaactggaatgcctgagactaaatttttattatttggtgataaagaagcattaagaaaactaatccctgaagatcaaattaatgatcaattaggagttgtacctacaactgaagttattgctgatgaagatgaaccagttaaggcaatcagaaaaaagaaagactcttcaatggttgtggcagctaacttcgttaaggaaggaaaagctgatgcgttgctttccttaggcaatactggtgcattgcttgcttgtggaatttttattattggtcgaatcaaggggattgttcgtccaggtttgatgcctactttacctgttcaaaatagtgacgatggcttcaatatggttgatgttggtgctaatgctaagagtaagccagaatatcttttacaatgggccgaaatggcttcgtactatgctgagaagattcgcggcattaaaaatccgcgagtaatgctcttaaataatggagctgaaagcgacaagggtgatgatgttcaccaaaaggcctatgaattgcttaaagaaagtaatttgaatttcttaggtaatattgaaggtaatgaattgctattaggcaaggcagatgtggtagtaaccgatggctttaccggaaacgctgtacttaagaacattgaaggaacctctagcgtcttgcttcatttattaaaagatagtttattaaatggcggtgtaatgaccaagttaggtgccttaatggtgaagggctcgttatcaagcttaaaatctaaatttgatacggctaaatatggcggtgcagttttactaggcgttaatgcaccggtagttaaaacccacggtagatcaaatgaacgtccaatttatttcactcttaagcaagtagataaaatggttaaagaaaaacttgttgcagattttagagacgaattcgctgaaaaatagtacaatgttttattaaaaaggagaagttttatgtcagaagaagaaatttttaataaaattaaagacatgatcgctgataattttgatgttgataaggatgagatcactgaagacactaattttatgaacgatttggatgctgattcaattgatttggttgaatttatcttgcagctagaagatgaatttggcgcagaaattcctgatgatgaagctgaaaaaattaaaacaattggtgatgctgtttcatatattaagtctcatcaaggataattttctaaaaaaagccgtgtcgtgatttgcatacgaccggctttgtgtttagaattagaaaataaatagaaaagattaaatgcttttaataaaaaagctcgagatggaggaatgacctttggagaagcagagtgatcttttattagatattcaacacctgcatacggcataccgtttgcaagggaaattctatgatgcggcagacgatgttaatctgactctgaagcgcgacgagattttagccatcgttggtgaatctggttgtggtaagagtacaattgcctcaagtatcattggattgtacgaccataaaaatactaaagtaacaggggacattctttacaatgaattaaacctagttggcttgaatgaatcacttttcaataagattcgtggggacaagatcggaatgatcttccaggacccattagccagcttgaacccattgatgcgtgttggtgatcaagttgctgaaactctttattaccacactgatatggacgaaaaggcacgtcacgcacgtgtcattgaattgtttaatcaagtaggaatgccaaagcctgaagaaatgtacgaaatgtacccacatgagttgtctggtgggcttcgtcagcgtgttgtaattgcgatggcgattgcatgtaagcctgaagttattattgccgatgaaccaacaacagctttggatgttactattcaagctcaaattttggatttgcttgaagatattcaaaaacaatctcactcagggattattttgatcactcacgacttaggtgttgtagcagaaactgctgatgaagttgcagtcatgtatgctggtcaaattgttgaaaaatctgatgtaaagacaatttttgaaaacccacttcatccatatactcgatcattacttaactcaatgcctcaatcagacgatacggatgaagatcttcatgtaattcacggtactgtgccatctttgaagaatatgccacgtactggtgatagatttgctgcaagaattccttggattcctgctagcgcacatgaagaagaacctaaggtgcatgaagttgcgccaggtcactgggtaagatgtacttgctggaagtcattccactttgaggatgaaaagacagcaagtggggagtagtttatggcaaaagaaattattcaaatcaaagatttaaaggtctattacccaattcgctctggattttggaacagaattactgattatgtacgtgccgttgatgggattaatttttcaattggtgaaggtgaaacttacggtttaatcggtgaatctggttctggtaaatctactaccggtaaggcgattgttggggttgaaaaagttacaagtggtcaaatcatgtataagggtttggacgtaactaaggcaagcaaccgtaagaagcttgattataataaagatgttcaaatgatcttccaggattcaatgtcaagtttgaacccaagaaagagaattgaagatatcattgcagagccaattagaaactttgaaaatctgactactgatcaagaacgtgatcgtgttcaagaattgttggatattgtagggatgcctagtgatgcgatctacaagtacccacatgaattctcaggtggtcagcgtcagagaatcggtgttgctcgtgccgttgctactaaccctaagttaattgttgcggatgaaccaacgtctgctttggacttgtcagttcaagcacaggttttgaacttcatgaagcacattcaacaacaatacaacattgcttacttgttcatttcacacgacttgggtgttgttaagcacatgtcagaaaacttggcaatcatgcaccgtggtcgtttggttgaattaggtagccgtgaagaaatctacaagcacccaattcacatctatactaagcgtttgctttccgctattcctcaagttgatgttgaacatcgtgaagaacacaagaaacatcgcgaacaagttgaaaaagaatttgaagaaaatcaaagtaaatggtacgacaaggatggtcgtgtatatccattacaacaagtagcacctaagcactgggtagctttgccaaaagatatggcccacgaagctaaacttgaagaattagaagaaaaggagagtgattaagcatgtggaaaacgattttacggcgtttgttaatcatgatccctcaattgattatcttgagtttgctggtcttccttttggctaaaatgatgcctggtgacccattcagtggatcaattaaccctaacaccgaccctaaacaaattgaagccttaaaacgggctgcaggtctgtttgatccatggtacgtgcaatactttagatgggtgggcaacttgttccatggtgaccttggtacaagttacattcaacatgtgccagtaacttcattgattgctgaccgtgctaacaacaccttctggttatcacttttaactactattttgacttatagtattgctatccctcttggtattacttcaggtcgtcaccaagacgaatggcaagatactagtgttagaatttttaactacatcaccttggctaccccaggattcgtattctacatcttaggtttgtggctcttcggtttcaccttgggttggttcccaatttctggttctgtttcagctagtgcctctggtttctggggcgtacttggcagtagaatctatcacatgattttgccagcaattctgtatgccttgattactactactggtactgttcagtacttaagaactgggattgttgataacaaggttgaagattacgtaagaactgctcgtagtaagggtgttccagaaagcgtcgtcttccataagcacattttgcgtaactcattattgccaatcgctgccttcttaggtaacacgattaccggtcttcttagtggttcaatgatcattgaaagtgtatttagttatcctggtatgggtaagttgttccttgactcaattgggcaacgtgactacactaccttgactgccttgattcttatctttggtatcttaactttaatcggtaacttattatcagatatcatcatgagtatcattgacccacgtattagaattcaataggaaggagagaaaaaatggctgataagaaagaaaaagctacaaagaaagctactaaaaaagacgaaaagcaaaaagcaactctcccaccttctggattcaaggtggcaatgcgtgaaattgtgcgttcaaagtctgctttaactgctctgattatcattattgtcattttactgtttacttttggaggttcattattcttgaatcgtgcccaagtaacagaaatgaatattgctgactcatactatggttggggtgaagcgggccacttgctaggtacggatgatggtggtcgtgatatcttgaagttgctcatcatgggtgggcgtaactcaatcatgatcggtatctcagtaactgtaattactgaaatagttggtttagtagttggtttggtatcaggctactttggtggtgcaatcgactcagttatcatgagagttgttgacttcattcagattttgccacaaatgccaattattattgttttgactactgttatccctaactacaatgctgtaactttggtattcttgattgcgatgtttgggtggacaacgacggcacgttacttccgttccttcgtcttatcacagcgtggtcgtgactatgttttagcatctaagacttcaggttcatctaatttacaaattatgttccgtgaagttttgccaaacattacttcaatgattattatcgacgttgtattgagtattgcaggtaacattggtattgaaactagtctttcattcttgaactatggtttaccaagtaccacgccatcacttggtactttgattggttttgctaatgacccagttaacgttattaaccgtccatggttgtggttgccagctactatcttgcttttggtaatttccttaagtattaactatgttggtcaagccttacaacgtgctggtgacgcaagacaacgtgaaaactaataaagtaataattaaattaaaacagctctatcgcttggtagagctgtttttgcatatttataactagaatcttattgaaagcaaataaaataaaaattaaaaataatttcataaaactattgaatttttaatttatggtggtattatttaatcatcaacctgattcaaataactattgaaaatgaattgtatcctagatgggggaaacaaagtatgaaattatcaaaagtattgggttcagtaggagtcgtttctgcggcagcgttagctttagttgcttgtggtaagagtagcagtaacaatgctggcgcaaaggatgccaagaagtttaaggaaactactccagttaaggcagtcaaaaagggcggcactttatcatatgctgaagaaactgatacaccttttacaggtatttttaacaatgaattatcaacttctgctattgacacagatgtagcacagtttggtaatgaatcattatttgatactgatgacagttacaagattaatagcaagggacctgcaacttttaagttggaccgtaaagctaagactatcactaagtgtataattttttacggtaagttgaataaataattaaaaaagcccaagtcctttgaatttggacttgagctcaaacaaaaagaccagtagtctgatgttaagaacaaaaaacacattagaagctggtcttttatgaattcaattgtaactgaaatcgcaaatattataaagtctgaagataattatattaagcgtgaaagaaaaataatctgtttcttcttaaacctgattaaggaaatcatggccttggctttagctaaagttgatgatgaaatgattaccaaggttaaagcacagggctatcagattgataagaagaatgagcgctcaatcaatatggcttttggcgaagttaggtatgtcagaagaagatatgtctgcccaggcaaacaagcaaggtatcccttggatgaattaatgggctttgacaaatacaagcgctacagtattttagcagtcaaaaacatcttagaagtaagcagcgttgccacttatcgcaatactgctctagcagtcaattgcctgtctggctttaatattagccatatgcaggtgggcaatttggtaaaaatggccgggaaaaatattaaagcgggccaagaagcagattcaagatatgatgccgcaggcactaagaaaaaggtcccagttttgtatcttgaaggcgatggcgtggtgatcaaaggcactaaaagccggttggaatttcatcgctatcaggtctgtgaaggcattgtcaatataagcaagaaacgcagaaagcgaatcaatgccaaggaatttgtttctttaagccgacttgatgcgctgaacgaagccaaggagtacctggccaatacttatgatctttctgatactgtaattcttagcaacgccgatggcggtgctggatatgccaaaacagacttcgatgacattgtagggctatgcaagcgtcatgagcatttcttggatgtctttcacctaaataagaaaatcaaagaaaggctatattttgcgcctgacctgcaaggcaagctgatttctgctttggaatacaaatacagctatgacaaagttaaaactatcctaaccactgcagaaagccgactaattgatgaattgaataccgagctcaatcatgattatctggggcgcctaaggaattatattgatcgtcattgggacgatattaagccgtttaagaaacgaaaactgactgtgactaaagccattggctgctgcgagagcaaccaccgcaagtatacctaccgtgttaaggggcaaggcaagaaatggtcaaaatctggagcagaaggcatgcttaggatcttaagctgcatcaagaatcgagagctggaattttggcttagcagcgagtttgaagattcagaaataactgtattgactgaacaggaattaaaagcagcggcccgtgacagcttaaagaagcgtcatgaagttcatttaggcatccagcatggcgcattaaccgcacaggtagctggcaatagttatttaagcaagctaagcagaaatttaagtcatataaatatttaagaaattaaggttagactaatggtttaaaggctaccgcaaaaacattgacacttacagactatcactattgaagttaaaaaaggtgttaagtggtaagatggtaagcaggttactgcaaaagatgtagagtatgaatatgaagttatggctaacaagggcacaaagtctcaacgttatactgcttcacttcaaaacattgttggtgtaactgaatatcatgatggcaaagctaagactatttcaggtattgatatgccagatggagcaaatggacgtaaagttgtaattcactttaaggaaatgaaacctgggatgcttcaatcaggtaacggatacttcctcgaaaccgcaagtccatatcatcaattaaagagtattccatttaataagcttgaatcatcagatgctgttcgtaagaatcctttgttctttgggccatacaagattagtaaaattgttcgtggtcaatcagtaacttgggttcctaataaatactactggagaggtactccaaaattagataaaattacggtatctgtagttaaccctaactctgcttctcaagctattaagagtcacaaatttgatattgctagagttgttaattcacaatggcaacaggttaagaacactaaaggtgttaactttgttgctaaagtaccacttcaatacagctacatgggcttcaaggttggtaagtgggaaaatggtaagaatgtcatgaacccaaaggcaaagatgaacaataagtcacttcgtcaagcaatggcctatgcaatgaacattgatgctgtggaaaagcgttatactcaaggcttaacattcagagtacctactttaattcctgaacaatttggaaattactttgacaaaaatattaagggatacaattataaccttaaaaaggctaataagttacttgatgacgctggctacaagaagaaaggtaagtatcgtgttcaaccaaatggtaagcctttgaccattcaccttgcagctatgtctggtagttctactgctgaaccaattactcagaactacattcaacaatggaagaagatcggcttgaatgttaagttaacaactggtcgtctaattgaattcaattcattctatgataaagttcaacatgactctaaagacgttgatgtattcatggctggttggtcactatctagcgaaccttctcctaacgatctttacaatgaaaaggcaccatttaactacactcgtttcgtaactaagaagaatactcagcttcttaaggacattgactcacaaaaggcatttaataataaatacagagtacaaaaattccacgaatggcagaagtatatgtttgatgaagcatatgttgtgccaacagttaatgcataccaaattgacgctgtgaatagtaagcttactggctactcacttaagccttcagatgctaactcagtttggtacaatgttggttacgctaagtaattcattaatcattagtaaaactaaactccaaaattctaaacataaacaaattccttatattaaattctaataactaactaatagaaaagacaggtatcttaatccaaatacctgtctttttcatgctattgttatgtttttgtaatagtgataaaattaaaggatcaacttgctccaagtaatggaggaattttactaatgaaaaaggcaaaactttttgctggtattacactgttatcaggtgtagctcttaccttagctgcctgtggtaagtcagaatctcattctgatgaatcaaagactgcttctaagtttaaggaagctgttcctactaaggctactaagaatggcggtactgttaaggttgctgttgaagctgataccccatttactggtatcttcaacgacgaactttcaacttcagctactgatactgaagttatgcaatatggtgcagaatcactttttggtactgatgatcactatgttttcaatgataaaggtgctgcaacaattaaggttgaccaaaaagctaagaccgtaactgttgaaattaagaagggtgttaagtggtcagatggtaagcaagttactgccaaggactatgaatacgcttatgaaattattgctaacaaagacactaagtcacaacgttacacttcaagtttagctgatttggaaggcttacaagaataccatgaaggtaagtcaaagactatctcaggctttgaaatgccagatggtgaaaacggccgtaaagcagttcttcactttaagacgatgaaacctggtatgaacacttcaggtaatggttacatttgggaagctgctgctccttaccactacttgaaagatgttaaattcaaggacttaatgtcaagtgataagatccgtaagaagccattgttctttggtgcttacaagttgcaaaaggttgttcgtggtcaatcagtaacttgggttcctaacgaatactactacaagggtaagccaaagctttcaaagattactgctacagtaattaaccctaactcagttgctcaaagtattaagtccagaaaatttgacgttactcaagtaatcaactcacaatggaagaacatcaaggatactaagggcgttaactttatcgctaaaattccactacaatactcatacttaggctttaaggttggtaagtgggatgccaagaagggcgaaaacgtaatggacaagaattctaagatgaataacaaggccttacgtcaagctattggttatggtatgaatgttaaccaagtttacaagcgctactcattcggtttatcattcagaattccaactttaattcctaagcaattcggtgattacttcgacaagaacatcaagggttacacttacaatatcaagaagggtaacgaaatcttggacaaggctggctacaagaagaagggtacttaccgtgtacaacctaatggcaagcctttaactattcgtttagctgctatgactggtagttcaacagcagaaccaatcgttcaaaactacatccaacaatggaagaagatgggcttgaacgttaagttaactagtggtcgtttaatcgaattcaattcattctacgacaaggttcaaaacgatgatccatcagtagatatgtttattggtgcatggtcattatcaagtgaaccatcacctaatgacttgtatagcgaaaaggctccaatgaactactcacgtttcgtaactcctgaaaacaccaagttacttgacgaaatggattcacagaaggccttcaaccacaagtacagagttgaaaaattccaagaatggcaaaagtacatgtttgatgaagcttacgtaattcctatagctaatagttactcaattactgccgttaacaagaagcttactggttactcacttaagccatcggattcaatgggtaatggtttccctaactggtacaatgttgcttacgctaagtaaagcaattatttaaaattacaaaagactgtttctaaattttagaagcagtcttttttctgtgacccgaaaactggtataatttataggtataaaaaggggcatttttatggtaagtacaaagtttttaaaaaaattaaaagacgattataatatcgaatttaacaatgaaaagctattagaagaagcatttacgcattcttcatattcaaatgaacatcccaatgatggaattcgcgattatgaaaaactcgaatttcttggtgatgctgtgctagaattagccgtttcgaattatgtttatcttcattatcctaagttgaatgaaggtgaattaactcgtttgagatctaatattgtccgaactgaaggattttcagaattcgccattgaatgtggttttcaagatgagattcacttgggcaatggtgaagaaaaagctggagcacgacaccgcaaaactttactggaagacgtgtttgaagctttcaatggggcacttttccttgatcaagggatgccagcagttgaacattttttgcatttaacagtttatccattgattgataagggtgaattcgatgattcacgcgactataagacagacttgcaggaagtattgcagcaagatggtcctgtgaatatcgaatacaccgttattagtgaatctcaattaccttcacactttgttgttgaactaaaaattaacggaaaagttgaatcaaaaggtgagggtcacaataagaaagcagctgaacaacaagctgctaaggtcgctttacaaaaattagaaaaataaggggatgaaaaagtgccattaacagaattagtgctcgatggttttaaatcattcgctgataagacaactattcattttgatgatggaattactggaatcgttggtcctaatggttcggggaaaagtaacattactgaagccgtacgttgggtaatgggtgaatccagtgctaagtcactacgtggaacgaatatgaaggatgtcatctttgccggtagtcaatttcgcaagccgctcaataaggcggaagttactttagtttttgataataaagagcgtgagttggcttttgattcagatcaggtctcaattactagaagatttctgcgatcaggtgacagtgaatttttaattaataatcagcaagtgcggatgcgagatgtgcggacactctttcttgattctggaatttcacctaatagcctagcaattatttctcagggtcgagttgatcagatcttaaattctcgtcctgaacaaagaagagtaatctttgaagaagctgctggtgttttgcattttaaacaacaaaaagaagctgccaaggcgcaaatggagaaaaccaaggataatttaattagaatcaatgacttggttaaagaacttgaaggtcgattggagccgctgcatgagcaaagttcgctggctaaagaatatcaatttcaaaagaagggactagatcagaaattaaaaagtctattagcttttgaaattgaggatttaaaccggcaaaaagaagaagtccaaaaagcagcagataggaaccaaatcctgttaacaaaactggataatgaagtaaaaggttcgcaaagtgctgtttctgaaaaacgggcagaatatcaaaaaattcaaaatgagcgagagcaaacgcagagtgaattattaaagctaagtgaccaattatcacagatcaatactaacttgcaggtcgcacagcaatcacaacagtttaataattcaactagggtagaaactcaacgtcaagttgaagaattgaaaaatagcttggttaagctaaaggatgaattgtctgaactgcagcggaataaaaagcaacttaagcaggagcaagatgctttacaagagcagcatgatcaattgactggtaaattgcacgatgatccagaagaattgagtaagcgactagaagattgtcgtaacgactatattcaacttttacaagatcaggctacaactaataatcagattgttaatctgaatactgaattaaaacgtagtcaggcagacactacttatcaaaatagtgatgtaagcaagcagctaaccgatgctcggactgaactggaaaagctgagaactgaaggcaagcagctgacagttaagcggcaaaaggaaaaagaaaaatttgcgcaagttaatgatcaaaataatgatttaactaaacagattaatcagattcggcaagccgttaacgcagagcgcagtaaattagagaaagttgaagcgcgacatgaagctttagtaaatattcaaaagcggcatgagggttattactacggtgtacgtaatgttttgaatcatctatctgatttccctggtgtgatcggggctgtgggtgaattgattacatttccagttgagctagaagctgcaatgacgacagctcttggcggtggcgtacaggatttgattactgaaagcagagttagtgctagggatgcaattaatcaattaaagcgtagtcgtagtggacgagctacttttttaccattagatggcttgcgtcaatatactattccacagtcaactatcactactttgcaatcttttagtggctttaagggcgtagcaagtgatttagttgaaagtaaagccgatcaagatattactgctgcgattaattatttgctgggtagtgtgattatcgttgatacgattgatagtgcaatgtcaatttcacgtcgagttaaccgctatcggattgttaccttagatggcgatgtgatttccccaggtggttcgatgactggtggtcaaagaaaccaacgtaataattcaccactgcagacggcaactgaaattaatcagttagagaagcaattacagactttacgacaaaatttggctgaagatcaagaacggttagatgagctagttactcaaggtgaaaaagttgcggctaaattgcaacaactgcgtgatactttgcaggagactaatcaagcgattaatgaagctgctatttctttccaaaatcaagaaaaggaagtaaagcggctaactgatgctaatagtttatataaatctcgagtaaaagaacaacaagatcggattgctgctttaaagaaagaaatcactcaggctaatgatcagcaggaacaattggctaagcaaaatgaagtacaaaagggcaaaatgaatgacttgcaagaaaagattaagaacttcaatagcttaagtcaacgtgtacaagaggaattatcaaagcttgatcctcaaattgcagtttatactaataagttggaaaacttagctagtcaggaaaaagaaaaaaatattcagatcactaataatcagaagcaaactgatagcttagagcagaaattaactgaattaagtcaaaatggtgaattatcagttaaaaagaattctgatttacaaacacaaaaagctgaaattaagcaaaagaatgaaactctgcaaaagaagctgaatgaacttagtgcgcaattaggacaagttgatgcgcagattaatcaacttgaccaagttgccagtcgtaattatgatttacgcaaagatgcagcaattgaacaagaagattactcagtaaagattgcgaagtttaattccgcaattgatcagcgcttgtcaactttgagtgaagagtatgccttaacgtttgaagctgctttagagcaagcagaaggcgaaaatactgaagaaaagcgcaatgaactggctaaaagcgtgaagttgcatcacatgtcaattgaagatattggccaagtaaatcttgattctattcaagaatatgaagatgtgaaaaagcgctatgactttttgaatggtcagcaaaatgacctgttaaaagctcgtgatgaccttgaaaagtcaatgaacgagttagatgaagaagttaagacgcgcttcaagagtacctttaatcaagtagcatctagctttaagagtatttttccagttgtctttggtggcggtaaagctagattggaactcactgagcctaataatttgctagaaactggaattgagattatcgcacagccgcctggcaaaaagcagcaacgtttaagtctgctttctggtggtgaacgcgcgttaaccgcaattactttgttgtttgccatgttgcaggttaatccggtaccattttgtgtacttgatgaagtagaagctgccctggatgatgcaaacgttactcgttttgcgcaatttttgcttaaatacgatatgaaaacccaattcatcgtgatcacgcatagacgagggacgatgcggcaggctgaccaactatatggtgtggttatgcaagaatctggcgtttcgcaagtattgtcggtttcattaaaagaaatgaagaataaaaatgaggtgaaatagttgggtttatttgatcgaataaaaaaatcactctttggtaaaaaagacgaagaggatgaaaacaaaaaagaagaaaaacagactgagcaagaaaatgaagctaagactgaatcagaagataatgatcaagaatctgaaaaagtagttgatgaagctaaatcgaaaactgaaactactgatgaagaagaacaaacagtagaagcacaagaagactctgaggtagaagctgaatctggtgatgaagaaaaagcagtagatttagattctaaacaacagcctgaagaagttaaagtagaagagactactgagactgaaacagaagaacaagttgaagaaactgaagtttctgatgaggagccaacagaatcacaagaacagctttatgaaaaggggctagaaaagactaacaagggatttggtgcaagacttaacgccttttttgccaagtttagaacagttgatgaagatttcttcgatgatctagaagacttattaattgaatctgacgttggctatgaaactgctgaacaattaactaatgaattgcgtgaagaggctaaattgcaaaatgctaagtcacgtgatgacttgaagcgagtaatcgttgaaaagttggttgacctttacgataaaggtggcaatagcgaagatgagcaattgacgtataatgctgaagctaaacctaacgtttacctacttgttggtgttaatggtgcaggtaaaactactacaatcggtaagttagccaaacgttttaaggatgaaggaaagtcagtaattttagctgcggccgatacctttagagcgggtgccgttgaacagctagttgaatggggaaaacgtgttgacgtacccgtagttactggtaaagaaaaggctgatcctgcttctgttgtttatgatgcaactgaacgggcaatcagggaaaaagctgactatcttttagtcgatactgcgggacgcttacaaaataagaagaatttaatggctgaattggaaaaaattcaaagaacaatcaagaagcttttaccagatcagccaacagaaaccttgcttgtgttagatggttcaaccgggcaaaatgcgcttttgcaagccaaagactttgacaagaccaccgaattaactgggcttgttttaactaagttggacggctcatctaagggtggtgtagttctagctatccgtaacgaaatgaatttgccggttaaattggttggcttaggcgaaagagctgaagacttagctgattttgatgctgcaaattatgcgatcggtcttttccacggcttggtctagtgataaagttagagatgtaaatattgttttataaggagaattttatgaaagaatatagtgcttgtactactatcttagttggtaaaaatgcctcgattgatggcaccactatgattgctcgtaatgatgacacttttcgtccaattaccccacaaaagttcattattgagccagcccgtcatggtgaaaagaaacatattaagtcatggttaaacaagtttgaaatggacttgccagaagatgcgcaacgtgtaccagctgttcctaatgttgactacaagcatcgtggctactacgatgaaagtggaattaaccaagaaaacgttgcaatgtcatgtactgaatcaacttatggtaatgagagaactttagcatttgatccacttgttaaagatggattagatgaagactgcatgcagacttctgttttgccatacattcattcagctcgtgatggtgtacaatatttaggtaagttaattgctaagtacggttcaccagctggtaactcagttttattcagtgataaagatgaaatttggtacatggaaattgttacaggtcaccactgggtagccgagcgcattccagatgattgttacgctgcaactggtaatcgagttgcgattgaacaagttgactttgataatcctgattacttcatgtggagtaaaggtattcaagaatttgttgaagaacaccatttgaacccagatcatgaaggctggaacttccgtcatatttttggtacctatactgaacaagatcgtcactacaacaccaaccgtcaatggtatattcaaaaattgttcaatcccgaaattgaacaaaacccacaagatggcgatattccatttattcgtaaggcagctaagaagatcactaaggaagatattcaatttgctttaggttcacactaccaagataccccgtatgatccatttggtaagggtacggatgaagaaaaacatcgctaccgtccaatcggtttgaaccgtacgcaaaatgctcatattttgcaaattagaagtgatgttccagcagatcgtgcggctattatgtggttatgtatcggtggtccaactttcactccatttgtaccattctttgctaatatgaatgatactgatccttcatataacaatacctcaatggattacaatatgaatgatgcatggtggtattacaagtcatttgcagctatcgttgaaagtcattacccacaatttgttcagcttgatactacttatttaactgaacttaaccgctacttcagaggtcgagttgaagaaattattgctggtgcagaaggtaaatcaggtgatgaattaactgaatatttgactaaggaaaatcaaaagactgttgcccatactcgtaaggaaactgaaaagctttggggtcaaatgatgattgaatcgatcaacatgtccaaacttactttcaatatggatgaaaatctttaataaattcaaaacagctcgaaaaagggctgttttttataatatgtgaaatgaaaggaatatagacaatggcagaaggtactattggctcattttttactaagattaacaatgaagttgaaaaacaaatgaataacgatttaaaaaatttggtattaatgctaatgaattggaaatgcttattgaattaaatcatcatcagcatggcaaaacttttgaaaagttggctaaagaattgcatgtaactaatgacaaggtcaaatctttgacaaaaaaattggctgccaaagatttgtgcaagaaatttgaaaagcaccgtgcagaaactgaccaaactattacagggatgctcagtaaagatgaaactcttggcttggttaatgtactgaaaaagatgcttaagtcgagtgaagacaataagtaatgtaaaatagtagaactccagaagttaattacttttggagtttttttatgcaaaaattattgacaaatctttaatataatattactgtattaagtaaatagaacagtaatattattagtgaaaggataaaaatgtcagaaattttaagagtggatcaagtaactaagacttatggtaaaaaaggtgagaagcaataccaagctttaaaaggaattagctttgccattgaacaaggtgaattcgttggcattatgggtgcttctggttcaggaaagacaactttattgaatatcttgtcgacgttagataagccaactagtggacatgttttagtcaataagcaagacattactgcacttaagaacaatcaaatggcagattttcgcggaaaagaaattggctttatttttcaagatttcaacttgctagataatttgactaatcgcgagaatatagccttgccattatcgcttcaaggagtgaaggcaaaggatattgacggaaaagcaatggcgattgccaaaagattgggaatagaatctatcttggacaaatacccagctgaaatttctggtggtcaaaaacagcgtgttgcttcagctcgagcattggtccataatccggcaattttatatggtgatgaacctacaggagctttagattcacaatcagctacggaattattgaaaacaatggcagacttgaataagaatgatcaagtttcgattctgatggtaacgcatgatccttattcagcttcttacgctcaaagaattttgttcatcaaagatggaaaaatcggcaaagaaattaaaaaagaaaataagaccagagaagaattttatcaagatattattgctgaattaggtagacgttagagggaggtatagacgtgctttggaaattatcactaacagggctaaaaagtcgctttaaagattatgctgttttgttttcggggctaactctagctgctgcaatcttttatatgtttatgaccattgcaattaatccagcttttcttaagggttcaatggccattgccttttcaattacccagatggtctttatttttgggatagcgctattagctattattaccctagtctatattgtttacgcaaatagttttttgcttagtatgcgtaaaaaagattatggtacttatatgatcctaggagcgagaaatagtaaaattggccgtttaatttttacagagacggttgttattggtttactcgctactgcattaggaattttaattggtatcggcttgactcaagttgtttctcagttattaatctctcaactgggtttgcagctgcataaattcttaggcttttatttaccggctattttatggacagttgttttctttgtagttttatttttcttggctgcaatttggaatcggcacaaattggtaagtactagtgtaatcaagcttttgcatgaggatcaaaaaccagttaagttacgtaataaccgaatctggaaagcaactgaagtaattctaggccttgcccttctagccattggctactgggcaatgtgggattaccatcagttgcaaattaaatcggttgaaattggttttgtcactattttggctggttcatattttgtatttgattctgtatttactacagttatcaatgctttacggaaaaataaaaagtttaaatacagtaaactgcattcttttaccttaggtcagctaaaatttaggttaggtgattacaatagagttttaactgttatttccttgctttttgctctagcattaggtgcgatcactgttggattaaactttaataatatgacagagactgctcttcaggcaacatattatgatgctgtgttgtataaaagggatgctaaagttaatcaacaacttaaaaaagttgccgttagaaaacaaacgactttgaattataaggtcaatgggaaaaagaagtttcctgttctatatgttactgaccaagaaattgctaagaaaaaaatcaaattccaatctggtcgaaagaacggcgaccaaatgaattggaagacaaagacgattacagttgcaggtgtaaagaataaaaaacaagagatgaatttccaacttgctagtttaacaccttattctgattatgaggttaaagttgtaactccagctgaatatgtgaagattcctggaaaaaacaaacaagtaaccttgctattaatcaataactttagaagtaattttaataatattgaaaaattgcaaaagatgtcacttgaccagacagttactaaggatgcacaaggagtttatgtttctctgaataattctaaatctgctcaatatcgcttagtagcaagcgttgcgtcaggttttgaatttatgggcttcttcttaggcttagctttcttagctatgttagcttcaaccttaatgtttaaagtgctatcaggagcaaacagtgatcgtcctcgatatgaaatgttgtggaaggtcggatcaagacgtaagttattaaagagctcgattaaagcggagattggtaccttgttcgctttaccggctgtcttgggtgtgattgatgtattatttggactacaatttttcaaagggattttagctaatccatacgataaaatttggattccatttacgatctttttagtattgtatttgctttattacttaattacagtaaaactctatgaaggaattgtattgaaaaaataatggtacgaaaaaagatctgcaaaatgcagatctttttaactgtatttagattaattttatttattttgcttatttaaaattgaatgacgaacaccatagctaaagtaaatgattaagcctaaaataaaccaaataccagcataaaatttagcttggtagtcaagccctaagaagacaattaaagcagccatgaaacctaaagcaggtaaaactggataaaatggcatcttgaatgaaggatcatcaatgtcttttccttcacgtggacgcaacttataaatacctaaagaaacaaacataaaagcaattaaagtaccagctgaaaccaattgtgacaacatagagaaggggaaaaatgctccaagtaaaattgctacgattgttaatgtccataaagcattattaggtcgacgatctgcattcaacttgcccagccatttaggaagcatctcgtcacggccaaatgaatagatcaatcttgaaccggccatactcatcccaatcaaagcagtgaacatccctaaaacagcaatggtttggacaatgatggcaacaattggatgaccagcaaaccgtaaggctaaacccactggttcagcggaattagcatacttctgataaggcataattccaattaaaactaaactaactccgacaaataaagtaacagcaatagcaagtgagcctaaaatgctgcgaggcatagttttttgtggattaattgcctcagctgagttagcggcgattgaatcaaagccaatgtaagataagaaaatcattgaaacaccagcatagattccttgccagccaccgaatggaccgttagcagtcatcttgtatttcggtataaatggggtgaagttaacttttttaattgcaaaaacgccaacggcaataaagagtagaatggctaacacctttaatacaactaaggcattttcaacgcgagctgcccttgaaacaccatgaccaattaataaggcaactaacaagattgaaactaaagaaatgatatcaataataccaccgttattgccaaaggcgttagataatgacgcgggtagtttccaacctaatggtgcgattagagctctaaagttagcagaaagccccgaaccgacgaaagccaaagcaatgaaatattctgctagaagggcccatcctgctacccaaccccagaattctcctaaaactacgttgatccatgaataagctgatcctgcaaatggcattgcagcagccatttctgcataggcaaaagccactaaaccagcagcgattgctgctaaaataaaggaaatcgctactgcagggccggtatgcttagctgcaacttcaccaggtagagtgaaaattgaagcggagacgattgttccaacacctagagctaagaagtcctttacttttaatgagcgcaccaggtgtccatctttattttcatagacgcgtggatcttctttactgttcattctctgccaaagattcacaacgcaacttcctccttatgttaaaatatattcatctaattataattaaaagtacgttaaaaaatcaactattacatatttgaaattccactttttttagaaattgttatctaagataggttaatctagcactagcttatgacctttgttatactaaagactggtgaaaatcaatggatgaactaactaaaaacgaggagctaggcgatttatatgcctactatggctctttattaacccaggggcaacaatcttattttgaagactattactacaatgatttgtctctaggcgaaatagctgctaatcatcaagtatctcgtcaggctgtctatgataatctcaagcgctcaagtaaaattcttcagaactatgaagagaaattgcatatgaagcgcgacaacaatcaggttgaagatgtcttggcagatacgcttttatctttagataatggtgatagtgaagctgctaaaaaagaaataaccaatttattaaatcaattgaggggagaatagcccatggcttttgaaaatttaagtgaaagaattcaaaaagcattaaaaaatttaactggcaaaggtaaggtctcagaagaagatattaataaggctagtcgtgaaattcgacttgctttgttagaagccgacgttaactttaaggtcgttaaggactttattaaaaccattaagaaagaagcccttggcaaggaagttcaggaaagtttaaacccaggtcaacaagtaattaagatcgttaatgaacagttaacgaagatgatgggtgaagaagcagttcctttaaacaagtctaagcatattccaactatcattatgatggttggtttgcagggaactggtaagactacgactgtgggtaaattagcctatcatttgcaaaagaccgaaaaggcccgtccgctgttgatagctggcgatatttatcgtccggctgctgttgatcaattgaaacaaattggtgatcagttaaaagttccagtatatagtgaagacggagaaaaagacgtagctaaaattgttcaagatggacttgcagaggctgaaaagaacaagaatgactatgttttgatcgatacagctggtcgtttagaaatcgatgaacctttaatggaagaattagagcgggtaaagaaagtaacccatcctgataacattcttttagtcgttgatgccatgactggtcaggcggcaacagatgtagccaaaggctttgacgaacgccttgatgttacgggcgtgattttgactaagttagatggtgatactcgtggtggtgcagctctttcaattcgtgcggtaactggtaagccgatcttatttactggtcaaggtgaaaaattaagcgatttagatgttttccatccagatagaatggcatccagaattttaggtatgggtgacatgctttccttaattgaaaaagcccaacaagattatgatgctaaggaagctgaaaaagtcgctgaaaagatgcgggaaaatacttttgacttcaatgattttgttgatcaattgcaacaagttcaaaaaatggggcctcttgaccaaatcatgaagatgattccgggactatctaataatccgcaattaaagaatctaaatgttgatcaaaagcaaattgatcatactgaagcaattgtttattcaatgactcctgaggaacgagaaaatcctgatatgcttaatccaagccgtcgccgaagaatagctgctggttcaggtcgtcctgtagttgaagtcaataggatgattaagcagtttaagcaaatgcgcgacatgatgagtaaaatgtctaaaggaaatatgaagggcttgagcaatttgcctggaatggattcgccaatggctaagatggcaatgcgccgaatgaacaagaatttcaagaaaaataagaagaagcgtttacgcaaggtaaaaagattccattcttaaaaaataaactgttaaggaaaaatactttacacctgttaagtttggtggtatattattaatcgttaagttttaggaggaaattaatttatgtcagttaaaattcgtatgcaccgtgctggtgccaagagaaagccattttacagaatcgttgttgcagactcacgtatgccacgtgatggtcgcttcatcgaacaagttggttactacaacccagtttcacaaccaaaggaattgaagcttgacgaagacaagatctttgaatggttacaaaaaggtgcacaaccttcagacactgttagatcacttctttcaggtgctggcttgatggctaagttgcacgatgcaaaatacaataagtaattttgctattaattaagagcttgatgccgtgtgcttcaagctttttttatacctaaaggagaaaaaatggaatattacgatgttgctcggattttaactacgcacggtttgaatggtgaagttaaagttagtataattactgatttccctgaagatcgttttgctatagggatgcatttggcaatcaaaggtgaaacttctcaagttttaactgtggccaagagtagaccttttaagcaattttggttagttcaatttgcagagattactgatattgatcaagctgaaaaattaaaaggaaaaatactagttgttagtgaagccgaccgcggtgaactacctgaaggcgtttattattataaggacatctttgactgtgatgtcattgatgaagaatccggtaagcgcttgggtaaaatcactgatattgaatcgcctggtgctaatgatatttggctagtccatgaagataatggtaaagagtattggattcctaatattgcatcggtggttaaaaaagtagatgtagctaataaaaaagtctatgttgagttattggagggcttacgcgatgaagattaatgtattgacactttttcctgatatgtttgctcctttgcaagtttcaatgttgggacgtgggcttgaagataaaaaatgggagcttaatttagttaattttcgtaatttcactaccgatgtacatcatcatgttgatgatacgccctatggtggtggcgctgggatggttttgcaaattatgccgattaaaaaagcacttgactcgttaccatccacaggtaaggtaattattactgcaccacaaggtaaaacttttaatgaaaaaatagcgcaaagctgggccaaagaagatgaattaacctttatttgcggacattacgagggctttgatcagcggggttatgacttggctgacgaaactgtttcaatcggtgattatgttttaactggtggtgaattgccaacaatgagtatgattgatgctacagtaagacttttacctggtattttgggcaatgcagctagtccagttgaagaaagcttttcacatgggttgttagaatatccgcaatatacgcgtccagcagattttgaagggcaaaaggtgccagagatattgactagtggcaatcatcaaaaaattgcacaatggcggcataaagaggctcttagaacaacatatttgcatcgacctgatttgctcaaagaacgagttttaacaactgaagaaaagaaaatgttggcagatattaaagcagagcttgattaagcaagctctacttgatatactattcatcgtggcgtgaccacaatgaataagtttaggggtgttccgctggcgttggtacgttgatgaatgccgaagaaggagaaaagtatattatggatccattaattcaagaattaactaaagaacaacttcgtgacgatattcctgcattccgtgcaggtgacactgttactgttcatgtacgtgttgttgaaggtactcacgaacgtattcagttgttcgaaggcgttgtaatcaagaagaagggtactggcatcggtgctacttacacagttcgtaagattgcttcaggtgttggtgttgaaagaaccttcccagttaacgacccacgtgttgctaaggttgaagttaagcgtcatggtcgtgtacgtcgtgctaagctttactacttacgtgaacgtcacggcaagtcagcaagaattgctgaagcacgtcgttaatcataacgtcaatcataaaaaaggtcagttccagtggaactggctttttttctacccaaaagttgtatataaaatgctatgatggagttatggaatgaatgaggtgaaataaatgaagttcaattgcaaatttgcacttgtggcagcaaccgtattgacagtagcacctatattatcttttcccaatatcacgactacggtacaagcaacgacgaagaaagcccaagcagctaagaatacaatccaggtaaataaagcaccaataatttatgatcgtgcaggtaattataattcgaaatatcatcaaaatatcaaagctggtactcatttaaaatatagtggcaagacttatattattcagcagcgctttgcagctgggattcctgtgccaactagtcgaattattggtggtaagctttactattcgattggtaaaggaggctatgttaaagaaagcgatgtgttaacctggcttggtaacacaaatacggtcaagttacattttcggcacaagaaaaattatatttatgataaaaatggtaaaaaattagttagctataatggtggcaagaattattttactaataaacaaaaaccaaaaattgaggtaccatactataattcgcctaagcaattatttaatattggtaagggcggttatattgatgccagccaagtaactactttgaatggcaagggaaccgtgtttttaaataataatgcacctatttatgatgcaacaggcaagcaattcaagaataaaaatctaaagcaaggcacggttttaaactattatggtaaacctaagaaagcggctgctaatactcaattttattattatcaaaataaaactaagatgactttacctgcaattcaacaaggtgatcatacttattttcagattagtaaaacacaatatatcaatgcggcagacgttgctttagtagatggtaagacgttgtgggataaaggacctgtgagtgtttctttaataaatgatgcatatgcgtatactgccaaatttaagcaaaataaaaaggtgctttatcgtgctggcgctaaactaacggttgatagaaccaaaatagaaggtgaaaaatcacctcaactttatttacatgttaaaggtaccaaaaactatctttatttgggtaatgaaaaagactatggcgcatcaccattagattatcgtcacggttcaactaatttaatattgcagacactgttgcataattagtctgtgtgtaatacttttaaactgatatcataaaggactattatcttaatagaaggtgatagccttttattttaaaaagatcacaatgataaaatggctgtatagtagtaatgatgaaaaaagattgtgaagaaattcaaccgtgaaacggttgtgaaactaagacaaaaatcacaaagctggcagatatctattactaatcttgatataaaggcatttgttattgtgaagctatttttgtaaaaaataatattaaatgtggaattagcgttagaaataatagttatccacatttgtaaatgtccccagtaaagtcgagtaaaacaaaaatttaaaagaagatggaaaaatggattatccgaaaaaactgattgacgaagtgaaagaacgatctaaaggcatgcagctagaaggaattaattctggctcgggtccccaacatcctttattaatgattgtcggtgaagctcctggtcgaaatgaaattgttaataatattccctttagcggggatgcgggtaaggaattggataaatcattgaagcagattggtctgacacgtgatcaggtatatattacatctgctgtgagaagtcgaccttttgcaatcaaaaaggtttttagcaagcgtgaaaataaagaagtaatcaaatatcccaatcgtaagccaaccaaaaaagagattctagctcatgcgcatttcttagattttgaaattgactatgctcaaccaaaactaattgttgccttgggtaatacgggattagaacgtcttttggggtctggtcataagatttcagctgaacatggtcaagtaattaaaaatacaccaattttacgtttaaatgaaactaaagacggctatatttggtcaaaagaaagatacactattttcccagaatatcatcctgccgctgttttttataatcgcaagctaacagatgatattattaaagattgggataaaatcaagccgtatgtagaaaaggaaaaatctgaaaatgagtaatgaaacttttttgattccaattagacaaaataatgatttatcggatatcgctttaaatgaattacgcatggatctagatgagcatgctttacatcaacgttattacactgatattgcttatttagcaggaaatagtcgtaagtatagtctaaatagtgtacaaaccgttgcgagtcctttgataggtaagaaaattttatttttgggttcttctgttacttttggttttggcgctttgggtgaaagctttgttgattatctttggaagcgtgatggcgttgctgcaattaaagatgcagaaaatggtacgaccttagttgatgaagatacttataagccaaacgattcttatgttgctcgttttagagaagagctgaccgaatcacaacctgatgtttttgtcttacaactttcaactaatgatgcaaatcaaaataaaaaactaggcaaaattactaatcaaaactttgacaccaaaaccattacgggagctttggaatatatgatttcaacggctcaagcaaggtggaaatgtccaattttaatttatactaatccttattttgctaatccgttatacaaacagatggttgaacgagtacacgaactggctcaaaagtgtcacgttgagattctagatttatacgatcatcctgattttcagcatcaagacgctttgtatatggctgatgaaattcatccaactcgtgcgggttatctaaagaaatggttaccattatttgaagaaaaaataactgaaattttggcataaagaaagacctagataaattatctaggtcaaaattgaaattagtcaatgttattacgatacaagctaactaccttacccaaaattgtaactttaggtaaaatgattggagccattgtatcattttctggctgtaatcggtagtgatccttttctttgtagaaacgcttaactgtagcttcattttcttcagtcattgccaccacgatttcaccattgttggcagatgattgtttgcgtacgattacgctatcaccgtttaaaatgccagcgttaatcatactttcaccgtggactttgagcataaagagttcaccagcatcactttttaagtctggtgggagtggaaagtagtcatcaatatcttcaactgccagaattggttgtcctgcagtaaccacaccgataactggaatttcctttggcttgatacctaactcttttttaccttcacgggtaatttccaaagcacgaggttttgtagcgtcttttactagccagccctttctttcaaggcgagctaaatgaccatggacagtggaagtagaagaaagaccaactgcagaacagatttctctaactgtaggtggaatgctccgtttctcaactgtatcgtaaatatattgcaaaatttctagttgctttttatcgcttgtttttcttggcatttttaattctccgtttgtatttatggtacttaatattataacctaattctaccagataatgtcaatattatcaaacaggcgttcttaagaagttatactttttttatgacataaaatagggtagactaatgagtgttaatgtgaggtggaattattatggataataaagatgcaatgagcaaagaagaagaaaaaaaggtaactgatcgaatcaacgaactttaccataagaaagaaaaggaaggcttaactccagaggaagaagctgaaagaaaagaactacataagaaatttttagctaactttagagctgcctttaagcaagatgttgaaaacatggtcatcttagacaagaatggcaaggaagttacctcagaacgtgccaagcgagcacaaagaagaaaaggacttagaaaagattaattagttctttcaaaaagttagagaactatgataagatataaatgttagttagatggaggatttaatatgaatttaggtttagcaatttttttaattatcattgcgctcttgattggcgctgtagcaggtttttacggtgcaagagcttacatgaagaagtactttaaggaaaatcctcctattagtgaagatatgatcgttgctatgatgtcccaaatgggtcaaaagccttcaaataagaaggtacatcaagtaatgaacatgatgaagcaccaacaaaagtaattaatttaattagttttgttagaaaaggcgaaggatttccttcgtcttttttgtgcacttttaagaatgaggtgaaatatgggaatatttagtaagttagggtggttttttaaggctgagaaaaaacgttatatcataggcattacctttttggcgttaacttctttagctaacttggtaccgccccgtgtattaggcttaatggccgatcaattggatcaaggtcacatctcttggggacaatatggaatgttgatcattgctgtcgtggccgctgcattcacactttatattttgcgctatttttggcgtaaacaaatttggggcggcgcagcagaattagagcgccaaatgcgttcaaagttatttgatcattttatggtgatggatcggactttttatcagcgtcatcgaaccggagatttaatggctcatgctactaatgacgtttctgccattcagaacgttgctggtgatggcgttttaacattggttgattctttagttatgggactttcaacaatgattgccatgatcatttttgttgattggcgtttaactattgtagctttattaccattaccgtttttggcattgggagcttggaaattaggtgatcacttacatgatgcttttgataagtcacaggctgcattctctaagctgaataataaaactcaggaatctgtatctgggattaaggtgctcaaaacttttggtcaagggaaagaagatactgctgcttttgacaagatggtcgatgaaacgatcaatattaataaaaaagtttttgtctgggattccttatttgatccactgggaacaataattatcggtactacgtatgtgatcacgattatttatgggggactattagtaactaacaagattttatcaattggccagttggtttcttttatcgcgtatatttctaacatggtttggccaatgtttgctattggttatttgtttaatattctagagcgtggtagtgcaagttatgaccgtgtagaaaagttacttgatgaaaggcctttgattactgatgcacatgcagatccaaatattacttctcaagatttgcaaggtgaattaaaatatgacattaaatcatttgcatatccagatgagccagatattccagttttaaagcaagtcaatttcactttaaaacctgggcaaactttagggttagttggtcgagttggtgcgggtaaaaccacaattattcaactgcttttgcgagaatttgatcagtatgatggtcaaattactctgaatggaaaagatattagaaatattcaactaaaggtattactcagtcagatctcctacgttcctcaaaataatttcttgttttcaactagtatcggcaaaaatattgctttctcttctgaaaatgtagataaggatgatattgcagctgcagccaagaagagtgatttgcatgatgatgttttgcaaatgcctaaaggctatgaaactttagttggcgaaaatggcttatctctttctggtggtcaaagacagagaatgtcaattgctcgggcattgctaaaagatagtcagattttgattttagatgatgcattgtcagcagttgacgcaaagaccgaaactgagattttgtcatcattaagaaaagagagagctgataaaactacaatgatcgcggctcaccgtttgacttccgtgatggatgctgatttgattttggttctaaaggatggtcaaatcgttgaacgtggtaatcatcaacaactattagctgcagatggatggtatgcggaaatgtggcgtagacaggaattacaagcgaaagtaggtgaagatacagatgaataataacgaagaacagcatgaatctgtttggtctaaggcgataccatttaaagagcaagttgatatttttaagcgtttaatgggctttgttaagcaatttaaatttgaaatgattgttgctttagttggtgcatttattgttagtgtaattaatattcttttgccacgtggcttgcaatatttcttagatcactttctattgcatcaaagcacaacagtgcaggtgattttgtttgcaggttttctttatgctttaggctcaattttaaaggcaataattcagtttacttaccaatatttctttgctttaggatcagaaaaaacgctagagagtgtcagaagggcattgtaccgcaaactgcataagctagggatgcgctattttgatcaaactcctgcgggctcaattgtttctagagttactaatgatacgatgactttgagtaattttttgacggtgctatcaacttttgtgattggtgctttttcggtgattactgcgttagtagcgatgtttactactaatatagttgctgggtggttgattttactctttattccgattttattattagttgtttggctttattcgcaaaaaagctcacgtctttatcgtaattatcgtgagcgtcttagtcgaattaacgctaacttaaatgaatcaattgaaggagtatcggttatccaagaatttaatcaagaaaaacggatgactaataattttgaaggcgaaaatggtggtttaatgaatacacgcttcaacatgatccgagtaaattcattgttattatcgccattgacatcgctgctttattcgttagctttagccatttcattaatgtactttggttttccattacgtgaaacttttgttccagctggtgtagtctatgccttttcacaatacatttcgcaactttttaatcctatttcaactgtgatggatcaaatgacctttttccaagatgggattgttgcaggaaagcggatttttcggattcttgatgatacccaatatgaaccacagcaggatgctcaaaaaggattgacgattactaaaggaaaaattgagtttaaacatgtaagcttttcttatgatggcaagcatgaaattttacatgatatttctttcgtagttaatccaggtgaaactttaggaattgttggtcatactgggtcagggaagagctcgattattaacgtgatgatgcgtttttacgaattcggtcaaggtgaaatcttgattgatgacgttaatattcgtaaatatcctaaagaagaattaagaaaaaaacttggcttggtattgcaagaaccgtttatgttttatggagatatttcatctaacattcgtttgtataataatcaaattactgataatcagattaaagacgccgctaaggcagtccaagcggatcgctttattgaaagaatgccgggtaagtatcatgctaaagtgattgaaggcggagaagaatttagtcagggacaaagacagttaatttctttcgctcgaactttagtcacagatcctaagattttggttttagatgaggcaacagcaaatgttgataccgagactgaaactttgattcagcaaggactaaagcggctgagaaagggtcgaacgacattagctattgctcaccgtctttctacgattgccgatgcggatcaaattattgttttagacaagggacgcataattgaacggggtacgcatgatcaattgcttgcacaaaagggttattactataatttgtataccttgcaaaataatgaaaataaaaactaattgtttttcaggacgtttgtgtagtagcaacgtctttttttgatataatagttaaaaagtattaaataattatgaatatttataaggagcaaaaatgaaaagatattttacagttcgtggtggagctggcgacgtttctaagccagacttaaatgctaagccacaagataacttatacttggctgttaactcagaatggctatctaaagcagaaattcctgctgataagacatctgctggtgtcaattcagagcttgaccaaaaaatcgaagatcgagtaatgaaagactttgcggacattgcggcgggcaaagaaaagatgcctgagattaaagactttgataaggcagttattttgtataagattgcaaaagattttgctaagagggatgcagaaaaagctaatcctattcaaaaggatttacaaaaattaatatccttaaataattttaatgattttaaacaaaaagctgccgatttgtttatgggaccatatgctttaccgtttgtatttgacgtcgatgccgatatgaagaacactgatgtaaacgtactccattttggtggcccaagcacattcttaccagatactacgacgtatcaaactgctgatgctaagcaacttttggatactcttcaagaccaaagtattaacttactgacaatgtccggtattggtaaaagcgaagcacgagtttatgttgaaagcgctttggcctttgatcaaaaattagctaaggtagttaagtcaactgaggaatggtcagattatgccgcaatttataatccagtaacatatgctgactttattaaaaaatttaaatcatttgacatggctgatttcatggattctattttaccggttaagccagatcgaattatcgttatggaaccacgttttctcaatcatgctgaagaattattgaatgaagggaattttgctgagattaaaggatggatgctagttaaatacattaacagcgtagctaaattattgtcacaagattttcgtgaagctgcgtttccttttggtcaagcagttactggtacgccacaattgccatcacaaattaagcaagcttatcgtttggctaatggtgcttttgatgaagtagttggtatcttttatggacaaaaatattttggggcaaaagccaaaaaagatgttgaagacatgatccaacggatgcttaaggtatatgaagaaagaattaatgctaataaatggctttctgctgaaaccaaaaagaaagctgtgattaagttaaaggcgttggttttaaaaattggttacccagacaagatcgaagaaatctttgacttattacaagttgatccgaaaaagagcttgtatgaaaatgaagcggcaatgtcaactgtacgaacgaaatatatgcttaataagttaactaagccagttgaccgttcagtttggctaatgccaggtaatttgaataatgcgtgctatgatccgcaaagaaatgacttaacctttccagctggaattttacaggcaccattttatgacattaatcaatctcgtggtgcaaattatggtggaattggtgcaactattgggcatgaagtatcacatgcatttgataatagtggagcaaaattcgacgaacatggaaatatgaacaattggtggactgacaaagattttgctgagtttaataaacgagttggtcaaatggttgatatttttgatggcttacaatatggtcctgctaagattaatggtaagcaggttgttggtgaaaatattgctgatctagctggccttgcttgtgtagttcaaactggggaaaatgatggggcggatttgaaagatttgtttgagaattatgctcgtagctggatgcagaaacaacgccctgaggcaattaagactgaagttcaaacggatgtccatgcgccacaaccaacgagagtaaacattccggttcaatgtcaaaatgcattctatgatgtatttaacgttaagccaactgatggcatgtggcttgatccagaagaacggattactatttggtaaaattgaataaaaaaatagtcactggatttcaatttctagtgactatttttgatatgtaattatttatcaagcatatatttacgagtcatcggtaaagttttacctgatggtccctttgtcaataggtattggataacgtcgatgttaccagactcgaaactagcagcacaagcattaaggtacatatcccacattctacagaatctttcaccaaatttcttttctacttcaggacgaacggcattaaagttcttatcccaaatttccaaggttctttgataatgacgacgaagagtttccatatcagtaatttgtaggcctgaatcgatgatgtcagtaacaatttctggtaagcctggtaagtagccaccagggaaaatatacttgtttaaccaagcattagtggcaccaccttgttgacgggtaataccatggattaatgcaacaccgtctttgttaaggtacttgtagacatcagcaaagtatttaggtaagttttctttaccaacatgttcaaacattcccactgaagtaatgtaatcccatttttgatcaccaagttcacggtggtcttgtaatctaacttttgcgacatcttgtaagttatcgtcgtagattcgcttttgaactaatttaaattgctcctcacttaaggtaacaccggtgacttttaaaccgtattccttagctgcagtaagcatcagagttccccagccacatccgatatcaagtagggtcttgcctttttgtgggtggagtttgtttaagatatgatgtacttttgcaatttgagcttgttcaagatcatctttattgccatcttcgaagtgggcgcaggaataggtcattgttgggtcaagccacatcttgtagaaatcattaccaatgtcgtagtggctttgaatatcttcttcgctttgcttttccgtgtgtttttgcttaggcataaacttacggaacttagaagcacgcatgaatgaatcagcactttcataagcaccaacaagcaatttttggatattaccatgaatttcgatttttttatccatgaatccttcgcccaaagctagagaagcatttcgagtgatttcactcattggaatcttttcattaaaaacaatttcaatttcaggatcaccattgccataaacttcgctcttaccgtcccagtaggttaccttaacagaaaaggggaaagatttactaagcatcattttgtaaaaagttttttgagactgtaaaatagtttgtgtaaggatgaatgattccttaaatttatttctttaaacattagaaaaaggagttcctttctcgtatgattggtttgaacaaaaaaaacacatacagaaagaagaactccttcatgaatgattttaccaaagattttgctcaagctctattcaatccagacaaaataaatgatttattgcgcaaagaactacaacaggctgttaataacttgctagaagctgaattgactgcctttctgggctatgatccctatgccagaaatggctggaatactggcaactctagaaatggtgcttatttccgcaaagttgatacgcaatttggcccaattgaagtgcaagtgcctcgggatcgcaacggtcaatttcatcagcacacgctgcctgactacaagcagcactcggatatcttggaaagcatgattatcaagctttactccaatggcgtgaccaccagggaaatagccgatctaattgaaaagatgtatggcagccattacagtccagctcaggtatcaaatatttccaagcagatgattccaaaggttgaggcttaccacaaacgcaagctaagcgacaagtttttctgcgtctatttggatgcgacataccttcctttgcgccgagaaacgtttgagcgtgaagcagtctatattgccattggcattaaacctaatggacataaggaagtcattgactactgcattgctcctagtgagaacattgaagtctggacagagatgcttcaaaacatgaagtccagaggcttgaagcaagttgaactctttctttctgatggtgttgttggcatgaaaacagccttggccaggacttatcctaaagctcattttcaacgctgtttggttcatgtcatgcgcaatatctgcgctaaagtacgcgtcgacgatcgtgaaaagatcatgaacgaattcaaacaggtgcatcaacagacaaacaaagaagaagccacagctgtcctgcatgacttctataccaaatggggcaaggtttacagccatgttatcagaagcttgaaagacatagaaccagatctgctggtcttttataactatcccaagcagatcagagcttcaatttattcgactaacatgattgaatcatttaacaatgtgatcaagcgcaaagctaagcctaaggcagagtttccaactgaacagtcgcttgatgcttttattggtattcaggcaatgagctacaatgaccgttatttcaatcgaattcataaaggctttggtcaggttcaggacaccttagaatcctactttgattaaataaataattaaaaaatcaatttacgagaaagaactatttacacaaaagatttgacagtttcagttttttctaacaattgctttttcctccaatatttaaaacctaaaaattattttaacacttatattaaattgcacaggtaaagaaaaatcagtataaagcaatatttgttttatactgatttttacttatttagcaacgtagtggaaatttggatccatttccttatctaatttgttccaagcatcttcaagttgttgaaataaaatttgttcattttcatgggttagtttagttttacgatcaatggtaattggatcaccaaagttaacttctaatggcttgcgcttaagcagtcctttaaaagttaaagggccttggtagacaacaggtaccattggtttttttgacattttggaaattaataaaactccaccttttaattcagctgaatgtcgcgtgcctgaaggaaagataattaatgataactttccttctctaagtcccttaactggaatctttaaggctgatggtccagggttatttcgatcgactgggaaagcgtgagcatgatcaagaataaatcgtaaaaccggatttttgaataattcaattttagccataaacatgaattccattggactagcacctagtgcaaaaagcagtggttcccaccatgtacggtggggggctactaaaatataattgccctgaggcaagcgatccttatgatgaatgtgtagatgaccgtttaacacccaaacgatgaaacggacaatcggacgtataattttgtaaaacattgtctcctcattgattccttcatttgatgtaagctattataaaaatataatgacgagaaaggcaaatatttttatggtagatctgaaagataatgagcgaattgactacatgtatagcgataatcttcgtattattcaagataaaacggcttttagtttttcaatggatacattatttttagcatattgggctaaagacttgatccgtgataaagataaggttgctgatttatgtgcaggaaattgtgcagctacaatctatatggcttattttaatcgtgcccattatgatgcaattgaaattcaaaacgaagtttattctcaagcagttcgttcagtcaagcttaatgagatggaaaatcgtatttcagtttttcaggataatgtgctaaatgcaggacattttttgcggaaagatagttatgatgtagtaacagttaatccaccatattttaaagcacctaagggacatgaagttaatccagatcgtaaaaaagcaattgctcgccatgaacttttgattaatttagagcaaataattgaagtggctagtggcttacttaaaatgaaaggcaaaatgttaatggtacatcggccagagcgcttaggtgagattgcttattattgtatgaagcatgacttaagcatcaaaatggtgcagccatttgtgccacatcgcggtgaagatgctaatttaattattgtagaagccgtcaagcatactggaactgatggaactgttttgaaagatgctgttgaagttcatgaatcaaatggcgacttcactccattagtacagcgaatctcacgagaaactgcagatgacaaagctaaacatgaagcacagggtaaatattacttttatgtcttactgtgtaatgatggcagtttttatggtggttttactaatgatttagaacatcgtttgaaaatgcacaatttaggaaaaggagctaagtatactaaaacacggcgtcctgtacggatgatttatcatgaacagtttgacgataagcgtttagctttgaaacgagaatattggtttaaacatcattcacgtgcttggaaggaaaaatttttgcatgagcataatataaagttttaatccttgcatactgtaatcttttcttgtagaatatttgagtatgctgtgtcagcatatgaaacttaaaacacatcaagagcaatcatcatcgtggtgcccagggtagtggttagatgatgaaatgaacgcttgagaggatataaaaccataggaggaatttaaatatggcagacgttgttacaatgaagcaattgcttgaagctggtgtccactttggtcaccaaactagaagatggaacccaaagatggctccttacattttcactcaaagaaatggtatctacatcattgatttgcaaaagactatcaagatgttagatgatgcttacaactttatgaaggctgttgcccaagacggtggcgttttcttatttgtaggtactaagaagcaagctcaagattcaattgctgaagaagcaactcgtgcaggtcaatactacgtaaaccaacgttggttgggtggtactttgactaactggtcaactatgcaaagccgtattaagagattaaagcaattaaagcaaatgtcagaagatggtacttttgatgttcttccaaagaaggaagttgctctcttaactaaggaaatggacaagcttgaaaaattctttggtggtattgaagatatgccaagaattccagatgtattgttcgtagtagaccctaagaaagaaaagattgctgttcacgaagctaacattttgggtatcccagttgtagctatggttgataccaacactgatccagacccaatcgacgtagttattccatcaaacgatgacgctattcgtgctattcgtttgattgctggtgctatggctgatgctgttgttgaaggtcaacaaggtcaagatgatgaatcagttgaagttgacttcaaggaaaatgcagacggttcagaagaaatcgttagcgctgaagaaaacccagaagactagattttactattagttccgtaggaggatctattaatggcacaaattactgcaaaattagttaaagaattacgtgaacgtactggtgctggcgttatggacgctaagaaggcattagtagaagttgacggtgacatggataaggctgttcaataccttcgtgataaaggtatggctaaggcagctaagaaggctgaccgtgttgcagctgaaggtttaactggcgtttacgttaatggtaatgtggcagctattactgaagttaactcagaaactgactttgtttctcaaaacgacaagtttgttaacttggtaaatgaagctactaagactattgctgaaggtaagccagctgatatggaagcagctaaggaattgaagatggctgatggtactactttagaccaatcattcgttaacgcaactgctacaattggtgaaaagattgttttacgtcgttttgctttagaagaaaagaatgacgaccaagaatttggtgcttaccaacacaatggtggccaaattggtgttatcactgttttagaaggtgcagatgctgcaactgctaagcacttggctatgcacatcgctgctatgagccctaaggttatttcaccagacgaattagatgatcaatttatcactgatcaattagctgtgatgaaccacaagattgaccaagacaatgaaagtcgtgcattggtacataagaaaccattacctcaccttgtttacggttcagctaagcaattaactgatgatgttttggctaaggctaaggaagacatcaaggctgaacttaaagaagaaggtaagccagaaaagatttgggacagaattattcctggtaagatgcaacgctttattgatgataatactcaagttgacaagcaatttgcagtgttatcacaagactacattatggacgatagcaagactgttggcgaatttttgaaggaaaaaggcgctaagttagttgctttccaacgttacgaagttggcgaaggtatcgaaaagaagcaagaagacttcgctgctgaagttcgtgaacaaatgaagtagtcattattacataattatcatagaaaggaggagtacaccgtgtgctccttctttttttgtaaaaattttgtagtgttttaagtgttaaaagacattgcggcattagatatggtagaataattaaagctattagaggaggtcattatgagtcaagttaaatataaacgtgtcattttaaaaatatcaggtgaagctttagcaggtgacaagggtacggggattaatcctactgtaattggtcacttagctaaagaaatcaaatcagttcatgatttaggtgttgaaattggtatcgtctgtggtggcggtaacatgtggcgtggtgaaactggcgctaagttgggtatggaacgtgctcaagcagattacatgggtatgttagcaactatcatgaatggtttagctttgcaagatggtcttgaaaaaataggtgttcctactagaatgcaaacttcaattgaaatgagacagattgcggagccttacattagaagaagagctttgcgtcaccttgaaaagggtcgtgtagtcatttttggtggtggtactggtaatccatacttctcaactgatactactgcagcccttcgtgcagctgaaattggtgctgatgtaattttgatggctaaaaacggtgttgacggtgtttactcagctgatccaaagactgatccttcagcaactaagttctcagaattaactcaacttgatttaatttcaaaagacttgaaggtcatggatagaactgcaagttcactttcaatggatactgaaattccattaattgtctttaacgttaatactccaggcaatatcaagaaggttgtattgggtgaaaatattggtactgttattagaggtgataaataatgaataacgaaactattgaaaaagcaaaaactaaaatgacggattctattaaggtttatcaaaagagattagcttctatccgtgcaggtgttgctaacgctgctcttcttgataatgtccaagtagaatactatggggcaccaactccattgactcaaatgtctagtattaccattcctgaaccacgtgtattgcttattactccatatgatcaaaattcattagatgatattgaacatgcattgttggcttcaaacttaggattaactccggcaaatgatggtaaggtaattagattagtaatccctcaactcactggtgaaagaagagaagaaattgccaaagaagttggaaaatttgcggaagaagctaaaattgctgtgagaaatgttcgccgtgatgccatgaatactttgaaaaaagatgaaaagaatggtgatattactgaagacgaacaacgtaacttagaaaagcaagtacaaaaagtaactgatgatgctgctaagcagattgaccaacttgctgatgaaaagcgtaaggaaattactcaaggttaaagatgagtaataaggataatgaattaaatcatttagccattattatggatggtaatggacgttgggcaaaaaagaggcatagacctcgttttgttggccatcgagagggaatggataatgttgagcggattactttagctgctgataaattaggaattaaagttttgacactttatgctttttctactgagaattgggctcgtcctaaagaagaagtagcttacttaatgaacctccctgttcgcttttttgataaatacatgccaacattgatggaaaataatgttaaggtaaatatcatgggctatttggatgaattgcctgaaaagacttatcgcattgttcaacgtgcaatgtcagagacggccaataatacaggcttaattctgaattttgcttttaactacgggtcaagaagagaaattacgtctgctatgcaggagctcggtggaatgattgaagctggttcactaaaaagcgaagaaattactgaaaaaatgatttcagaccatttgatgactaaaaactttggtccatatcaagatccggatttattaattagaacgtccggtgaacagcgaatttctaatttcttattatggcaattagcatattcagaacttgcctttagcgaaaaaaattggccagattttgatgaaaatgatttaaaaaaatttgtagaagattataagcaccgtaaccggcgctttggtaaagtagacgaatcggatagttaaatatgaaacaacgtacaattacggcaattattgccttatgtctttttattccaattgtgctcgcaggtggcctttggatggattggctgactgtattattcgcagcagttggcattagcgaaatctttttaatgaagaaacaaatcttagtttcttttaattttttgttagccttacttgcaactttaacctggacagttccagactcattctttaaagtatttccttcaaatatcactaaattaggtgtgttttatggaattattatgttgttcttgacctggactgttctttcaaagaataaaaccacttttgatgatgtaggtgtatatattttggctgcactttacattggaataggttttcactatatggcagccattagagcatacccacaaaacggtttagcattgctgggttgtgtttttgttgttgtttggtccactgatatcggtgcctacatgattggacgtaagattggaaaacataaattatggccagttattagtcctaataaaacatgggagggctcgatcggtgcagttgtttgtgccttaatttgtagtgccatctatatggcaattcttggcagcttgggtattaactttggtgtatctgaattaacgatgattattctggcctttttcttatcaattgttggtcaaatgggtgatttagttgaatcagcttacaagcgtttctatggtgtgaaagattccggaaagattttgccgggtcatggtggtatcctggatcgctttgatagtatgctgtttgtattgccagtagtggctacaattttaggtattgttcattaggagaattttttattgaagggtatactaatctttatcgtcgtctttggtatattggtatttgtccatgaatttgggcattttatcgtagccaaaaagtcaggtattttggttagagaattctcaattggaatgggtccaaagctttttcaaattagacgtaaccccaccacttataccattcgttggttaccacttggtgggtatgttcgtttagcaggcgctgacgatgaaagcaagctggatcctggtatgacggttgttttacaattgaatgaacaaaatgaagtagtgagaattgatgcttcagaaagcgaaataccaattgaaggaattcccgttcaagtaacaaaggctgatctagtagacgatttaataattaagggttacgaaaatggcgatgaaaatgatccagtaacttatcacgtagctcatgatgcaactattattgaaaaaaacggaactgaattaattattgcgcctcgagatacacaatttaatcaagctaatgtttggcaaaagttggcaactaattttgctggaccttttatgaacattcttcttgggtttgtagtatttttaatctggacatttacagttccaggtccagcaacaactacagttggatcaactcaggctaattcaccagcgcgtgatgcaaaaattgtgactggtgatcagattgtggcaattaatggacaaaagattaataattttgatcaagtgtcacagcagattaatcaaagtaaaggcaaggtcttacactttgaattaaagaaaaatggtcaaattaggaaagttacagttaagccaaaagctcataaaattcaaaaacaaacagtttatcaaattggtattgtagctaagagcaatgagaatgcagttgttaaattaaaacgtggctgggatacagctatttcaactaccggtctgattttcagagccgtaggtaacttatttagccactttagtttgaataaattatcaggtccagttggaatttattctcaaacttcacaagtttcacaaatgggctttacttatgtattagcctttttaggaatgatttcgattaatttgggaattgtcaatttaattccaattcctgggcttgatggtggtaaacttttattgaacttaattgaattagttcgcggtaaaccgatttctgaagaacatgaggcaattgttgaattaattggtttcggcttattattagttttaattattgcagttacaggtaacgatatctatcgctattttattaaataattatattttttactttaggagataagaatgcgtcaatcaaaattttttatgccaactttgaaggaagcaccatcagatgcagtggctgaaagtcataagctgatgattagaggtgggtatattcgtcaagtcacagctggagtttatgcttatcttccattaggctaccgtgttttacgcaaggctgagggaatcattgaacaagaaatggataaaattaatgttccagaaatgattatgcctcatttacttcctgcaactttgtggcaagaaagtggccgttacaagaaatatggtgcagaaatgttcaagttaaaagatcgtcatggacgtgaaagcttgcttggacctacacatgaagaaacttttaccgaaattattgctaagaacttaaagagttacaaacaaatgccacttgctttgtatcaaattcagactaagtttcgtgatgagaatagacctcgttttggccttcttcgtgggcgtgaatttgtaatgcttgatggttacagttttgctgcaactcgtgatcaattggatgaacaatttgatgatcaaaaaaatgcatataagcgtatctttaaacgtgccggtgttactgttcaccctgtaattgctgactcaggtacaatgggaggtaaaaactctactgaatttcaagcccctgctgctatcggtgaggatacaattgctactaatgaaaaaggaacatatgctgccaaccttgaaatggctaagagtattgatactttcaagcaagaaccagaagatgctaagcaattaactaaggtagctacgccaggctgcgatacaattgaaaaattagctaaattcctcgatgtaccagctactagaattgttaaaagtattttatacattgctgatgaccaaaaagttttagtattaatccgtggtgacaagcaaattaatgaggttaagttgggtcatatccttgacgctgatgaggttcatgaagcaaatactgctgatttaaaggaaatcactggtagtgaaaagggtggcgttggtcctgttaatgcagattgggctgataagattattgcagatgaaactgttaagaatctttacaacgttgtagttggtgcaggtgaaaccgattatcaatttgaaaatgctaacttagaccgtgatttcaaggtggatgaatttgctgatattcggactgctaacgaaggtgaaccagatcctgttgatcatttaccgcttaagttcactacttcaattgaagttggtcacattttcaagttgggtacttattacactaagaccatgggtgcagatttcttagatcaaaatggtaaagcaaagcctgtcatcatgggttcatacggtattggcgttactagaatgttatcagcagctgttgaacaacacttaactgaacgtggtgttgcatggccaaaggaaatcgctccatttgcaatacatattgttcaaatgaagatgaataaagaagatcaaactgaattagctgaaaaacttgaaaagaaattcagtgaaaagtatgatgttttatacgatgatcgtaaagagcgtgctggtgttaagtttgctgatgcagatttagtcggtgcaccaattagaattacgattggtaagaaggctgctgatggcattgttgaagttaagcgaccaactgatgacaaagcaaccgaaatgtcaattgatgaattagataagtttgtaaatcaagagttaggataatttttgtggcaaataaaaacgatcttttcttaaaattgctcaaacaggttcaatttcctgatagttttgaagacaatgcgcttctacaaaaagggaaaattgaaaacgtggatgtttacgctaaagaacacaggtgggatatccacgttttttttgatactcccttgatgtatgacacctatgtagcattaagaaaagctgtagaagaaactttttcttcttttgtaaatgtaagattttatgttggaacagctgatggttctgatcaatatttaccagattattggcattatgtagttcaaaattcaaatattttgcaacctgtggctcgtgaatttttggctggccaaaaacctaaaaaagttgatggccgctgggttattccagttgataataatgtgattgatggtttaattgagcagaaggctttagatgatttagctgaaaagatgcgtgattatggcttctttaatttgaaatttataactcagctggatcagacaagttctaaaaacaatttagaaagtttgcaggagttgcaacaagagcatgaaaaaagcatgcaggaagtctttgagaagacgccagacaaacctaaaccgcaacaacctaaacagtatccaactagacgtactaattatggtaaacgtaaattagatgaaaatgctccaattacacaaattaaagagctggaagatggcgtacgtaatgtagtaattgagggaaatatttttaatgttgaaactcgtgagcttaaatctggtgcaatcattttttctggcgaaattacggattatagtgattcaattgcatttaagaaatttgtttctaataaagatgaaattgaagagctatctgcaattaaaccaggaacttgggctaaaatgcaggggtcagttgctgatgatcaatatatacatgatgtagtttttaatattagtagcttagagactgtcgagcatgttgggcgaactgaaaaatacgaaggtgagcctaaacgagttgaactacatgttcatactaatatgagtcaggttgacgcaactaatactccgacggactttattaaaactgctaagaagtttggacaaaaggcaattgcgattaccgatcatggtgatgttcaatcattccctgaagcatatagcagtggtaaagcactggacatgaaaatattgtatggtgtagaagctaatatgattgatgatcatgctttactagttttgaatcctgcaccgatgacctatgaagaccgcgagtttgtaatttttgacgttgaaactacggggttgtcatctgtttacgacacaattatcgagattggtgcggttaagatgaagaacggagaagtgcttgaacgctttgataagttcattaatccgcaccatcctttaagtgagcaaactattaatttgacttcaattacagatgaaatggttggcgcagccgatgatgaagcagttgtcattaagcaattccaagacttttatggcgatcgaccactgtgtggacataacgttcaatttgatgttgggtttgttaatgcagcattaagacgtgcagggctaaaagaaattactcagccagtagttgatacacttgaagtatcgcgtttactacatccagagcagagtcgccatactttagattcattagctaagaagtataatgtttccttggaacaccatcaccgggcaaatcaggatgctgaagcaactggctatttaatgtttaaattgttagatgcttttaataaaaagtatcatgaaaataatttgaataatttgaatggctatgcagcacatggtgaagtttataaacgagcccgtccttcccatatgacagttttggcaaaggatcaagctggattaaagaatctttacaaattagtatcaattgccagcacgaaggactttttccgtattcctcgtacgccgaagtcagatttggctcgtttgcatgatggtttactttatggttctggttgttggcaaggcgatgtctttatcgcaatgatgcaaaaaggttacgacgaagcaagagaaaaagctaaattttatgattatcttgaagttcaacctccagcaacctattcgcaattaattgctgatggtttgattaaggatgaagatcaattacatgaaattattgaaaatattattaaattagggaaggaattaaataagcctgtagttgcaactagcgatgcccactacgttgaccaaaaggacgctatttatcgtaaaatcttgattgcggctcagagatcaaaccctagtcgaaataagccacagccagatttgcatttctattcaacacaggaaatgctagatgcattttcattcttaggcgaagatgtggctaagaaaattgttattgacaataccaataaaattgctgatgaattgtcagaaattcagccaattaaagatgggttatacccaccacatattgaacatgccgatgaagaaatgaagaagttgacctatgataaggcttatgaattatatggtaagccattaccgaagattgttaaggatcgaatagatttggaattaaattccattatttcgaatggttatgcggttatttacttgatttctcagcgtttagtagctaagtcaaataaagatggctatttggtaggttctcgtggttctgttggctctagtctagtagcaacgatgtcaggaattactgaagttaatccgttagctccacactatcgttgtcctaactgtaagtattcacaattctttgaaaatggggaatatggttctggttttgacttgcctgataaagattgtccaaaatgtggaactccattagttaaagatggacaagatatcccatttgcgactttcttaggatttcacggcgataaggttcctgatatcgatttgaacttctcaggtgactatcaaccagtagcccataattttattcgagtaatgtttggaccagataattcatatcgtgctggaacgattgcgactgttgcggataagactgcttacggttatgctaaacactacgatgaagagcatgatttaaagctaagaaatgcggaattagaccgtttggcagctggtgtccgtggtgtcaaaagaactactggtcaacaccctgcaggaattgttgtagtgcccgatgatatggacatttacgattttacgccggtatcgtatccagccgatgatgtaaatgccgcttggttgattactcactatgacttccactctattcatgataatattttgaagtttgatattctgggacatgatgatccaactatgattcgtcacttgcaggatttgtctgggattgatccattgactattccacccgatgaccctggagtcatgtcattattttctagtcctgatattttaggtgttactccagagcagattcaatcagaaactggaactttgggtgttccagaatttggtacccgttttgttagaggaatgcttgaggagactaagccaacgacattttctgaattattacagatttcaggtttgtcccatgggactgatgtatggctaggaaatgctgaggacttaatcaatcaaggaatttgcaaactgaaaaatgtaattggttgtcgtgacaacatcatgatggacttaattcactggggcgttaagccagaagttgccttttcaacaatggaatccgttcgtcatggtcgtggcatcagcgatgaaaatatggctattttaaagaaaaataagaatattccagattggtatattccttcttgtctgaagatcaagtacatgttccctaaggctcacgctacggcttacattttaatggctctacgaattgcttggtttaaagtatattatcctgaaatctattacacagcttacttttcagttcgtgccgatctatttgatttggttgcaatgagtcatggtaagaatactgttaaggctgcaatgaaggaaattcaggataaaggaaacgatgcatcagctaaggataagagtttgatgaccgtgctagaaatagctaatgaatgtctagaacgagggattaagatcaaaatggttgatattgatcaatctgaagcaactgactttaagatcttagataagcatacaattttagcaccgttcaatgctgttcctggtttgggggataatgcagctaagcagattgtagctgctcgtgcagaaaagaagtttttgtctaaagaagatttagctaagcgcggtaaagtatcacaaacaattatgaattatttcgaagaaaatggtgtcttggaagggatgccagatgaaaatcaattatcacttttctgatagttaaattttacaagatcaggtaaaacatggtatactacgtatgaagttcgaataggtaaattcgagtgagcagtgatgctcactctttttattacggaggaaaatttttgtctaaagttatagattctgttcgtccagttgtcgaaacaattattgatgaacatggtgacatgttggttgatatggaatacgttaaagaaaaagggcaaaattatttacgcatttatgttgatcgccaaccaaacggtattgacattgatgagattgcagctttaagtgaacttgtttccgaaaagctggatgctcttgatcccgatccacttccagatccctatgttttggaattatcatctccaggggcagaacgaccaatcaaaacaaaagctgattgggaaaaagctctgaatgattacattcatgtcggtctttatcaaaagattgagaataaaaaaatgtatgaaggtacactcaagtcttataatgatgacgaagttgtattagaaataaaagataagacaagacgaaaaacattaactgttccccgtaagttaattgcaaatattcgttttgcaattgaattttagaaaggttgatcaaaaacttatgtctaaagaaatgctagaagcgtttgctactttggaaaataccaagggcattaagcaagatattattgttgatgcaattaaagccgctttggtagctgcatacaaaaagaattataatcaagcacaaaacgttgaagttgattttgatgaaagaaaaggtaacttcaaggtaatggcagttaaaactgttgttgacgaagtgcaagatgaccgtcttgaagttagtttaaaggatgctttaacaattaatcgtgcttatgaagtaggcgacgaaattcgttttgaagtaacacctaaaaattttggtagaattgccgcccaaactgctaagcaagttatcatgcaacgtctacgtgaagccgaaagaaaacatattattgatgaatattcacaatatgaagatgaattggttactggtaccgtggaaagacgcgacaatcgtttcgtttatgtaaagattggtaatgttgaagctgttatgcctcaccgtgatcaaatgccaaatgaggtttacaatccccaagaccagattcgtgtactagtaactcatgttggctccgatagcaagggtgcacaaattacagtctcaagaactgctcctgacatggttaaacgattgtttgaacaagaagttccagaaatttatgatggaaccgttgaaattgtttcaatcgcacgtgaagcaggtgacagaactaagatggctgttaagtcaaatgatcctaacatcgatccggtaggtacctgtgtaggccaaaagggtgctcgtgtacaaaatgtagttaacgaacttggcggtgaaaatattgatatcgttaagtatgaagaagatccatctgactttattgctaatgcattaaatccagcagaagtgattgcggttcaatttggtgatgatgaagaagaaaaaagtgctttagttatcgtaccagattaccagttatcacttgcaattggtaagaaaggtcagaacgttcgcttagctgctcgtttgacaagctataagattgatattcgtcctgaatctgaagtagaatttgtagatgaaaaaacaaatgatacagctgatgctgcagatagtagcgaaacttctgaaaatgttgaaagtacagatgacgctgctgacgttgaaagctcagatgatacaactactgtagaagattcaagtaaagaagataaaactgaagaataggtgattttttgaaaaaaagaaaaatcccaatgcggaaggatttattaaccgatacaatgcagcccaagaaggaattagtacgtattgttatcgataaagaaaaaaatgtgtcagttgatccaacaggtaaaaaggctggtcgcggcgcatatgtttcccttgatccaagtaagattgaagctgctaaagagaagaatgtattagaacgtagtttaggtgcgaaagttccagatactttttacgatgagctttactcttatgttgatcatcaaaaggcaagaaaagaattatttggtgataaataagattgcaaaatagacaaaaagcaattaatttgttaggtttagctgagcgtgctggtaagttaactaccggtacagagacagtcattaatgaacttaataagcacaaaatcaaagcggttattatggctagtgatgttcaagacaacacggcagaaaaagtaaaccgcgctgccagaaaagacaatattcctatgataactatgtttactgccattgaattgtcaaaggcaattggcaaaaaacgcaaagttttaggattaactgatgctggttttgctaaggcgttagttaaaaaaataaatgaaggagtgtgattggatggcaaagaaaagaatttatgaaatcgcaaaagaagtcggcgttgataacaaagttgtagtccaaaaagcaaaggatttaggcttagatgtaaagaatcacatgtcatcagtagatgattcacaggttgcaaagttaaagaatagtttccaaaactccgctcctgctgcaaaatcttctaataaaaagaataaaataaaaatctctgtttcttctattcgcaaaaatgaaaagaagcaagaagataataatagttctaagaattctaagagacgcaataataaacgtcgttcaaataatcacggtcatgagaataaaaatgatcgtagaaataatacaggtaagccaaaggcagctgctttgttacaacaatttaaacaaaagcaacgggcagaagaagggcaacttaatcgtgaagcccaaaaagccagaaaagaatatcatgagcaattaagacatccaaaacaagaacagccagtgaaagataataagaaaacaagcaaccacaaagataacaagaagaaagcagaaccagtagaaaagaaagttattggtcctaagattttaaagccttctccagctcgtttgaagaagcaacagcctgaagcgactaaagaactagttcaagttactattcctgaggctcctaaggaagaaaaacgcggcaataatcgtggtcgcaacatgggaaagccaggacgcaagggtaaaaatcaatttggcaatggtcgtagtgaccattcagatcgttcagagagaaagcggcgtaagaataaaaaacgtcaacaagagcaaaagccaaagaaaacacttactaagcgtaaggaacgtccattaccagaaacattagtttacgaagaaggtatgaacgctcaagatattggtaagttaattcaccgtgaaccagctgaaattgttaagaaactcttcatgcttggcgtgatgactaaccaaaaccaatctttggataaagatacaattgaacttttagctgctgaatatggtatcaatgctgagcaaaaagttcatgaagacatctctgatattgataatatctatgacaagagaatggaagagtcaaaggaatctaaaaaccaggttaaacgcccaccagttgttacaatcatgggacacgttgaccatggtaagaccactttacttgatcgtcttcgtcatactcatgtttcagctcatgaagctggtggtattactcaaaagattggtgcttaccaagttagattagatgatcgcttaattacattcttggatacaccaggacacgcagcattttctaacatgcgtgcacgtggtgctgaaattactgatattgttgtactggttgttgctgcagatgatggtgtaatgccacaaactgtagaagcaattgaccatgcaaagagtgctaatgttccaataattgtagcaattaacaagatggataagccaggtgcaaatccacaacacgtaactgaggaattaatgaaatacaatttgattcctgaagattacggtggtgatactatcttcgttaatatttcagctaagacaggtcaaaatgttgatgacttattacaaatgatcttgttgcaatctgatgtgatggaacttaaggctaatccaactgaaatggcaattggtactgtgattgaagctcgtttgtcacgtggtcgtggacctgtagcagacgttttaatccaacaaggtacacttaatgttggtgacccgattgttgttggtaacacttttggtcgtgttcgtactatgactaatgatcgtggacgtcaagttaagaaggctacaccatcagaacctgttgaaattactggtttgaacgatgtgcctgaatctgctgataagttagttgaatttaaggatgaaaagaccgctagaagtgttggtgaagctagagcacaacaagctttacaaaagtctcgtgaaaatgttcaacacgtaactcttgataacctcttcgatactatgaagaaggaaaacatgaaggaagttgacattgtcttgaaggctgatgttcaaggttctgtagaagctttacaacaatcgcttgaaaagattgaagttgaaggcgtacgtgtaaatatcattcactcaggtgtaggtgccattaatgaatcagatgtaactttggctggtgcatcaaatgcatttattattgggttcaacgttcgtccaactgctactgctaagagccaagctgaaaccgatggcgtagatattcgtctttacagcattatttacaaggctattgatgatgttactgctgccatgaagggtatgcttgaaccaacttatgaagaaaaggttatcggtaatcttactgttcgtgaaacttggaaggtttctaaggttggtacaattgctggttccttcgttgataagggcttggttaagaatgattctaagattagagttattcgtgatggtatcgttaagtatgatggtgaaattgcttcacttaagagatttaaagatgatgttaaggaagttaagcaaggtaacgattgtggtttaacgattaaggactacaacgacattaaagttggcgacgaattcgaagtttacgaaatgcaacaagttgagcctaagtaattactattaggaggaaaacatgaagcatagaattggtcgtgttgaaggtgaaattctacgcgaattaaccaagattttacaaaagaatattcgtgatccgcgcttaagtggtgtaactattaccgcagttgaatgtacgaatgatctttcatatgcaactgtttattacagcctgctaactgaagatgagcataaggaagaagaggttcaggcaggttttgaaaaggcaaaaggcatgatgcgtcatttgcttggtcaaacattaactgtttataaggttcctgaattaatttttaaacgtgataattcagttttgtatggtagtaagattgaccgtttgattgcagaagttaagaaacaagatgctaagcgggaaagcaaataaaaaagagggcgccgtgatggtgccctttttttgttgaaaagaatagggaataattatgttaaacggaattttagttattgataaagataaagggatgactagtgcagatgtagtttatcatttgcgccgcgtattacatattagaaaaataggacatgctggtacgcttgatcctgaggtgacaggcgttttaccaattgctattggtcaggctactaaattaattgaaatgatgcatactaggccaaaagaatatattggcacgggactatttggttatagcacagatagttatgatgcaactggaactgttttaaaagaaaaaaagttgattcagcctttttctggtgcagaaattcaagaaaatatgaataaatttgtaggagaaattgttcaagtgcctccaatttattctgctgttaaagtgaatggtaaacatctttatgaatatgcgcgtgaagagattgaagtcgagcgacctcagagaaaggttgaagtcaaacaatatgatctaactaaagaaccagtttttgatataaatactgggcaagaaagctttgattttaagattaaatgcagcaaaggcacttatgttagatcgttagttaatgatctaggtgaaaaattagattgccccgcaacgatgacttatttgagaagaacagctagttctggctttgatattacacaagcagtaaaattaaaggagattgaagagaatccgaaaaaggccactgaacttatacagccgattgatgcattttttaaggaatacactcaggttgatttaactgaagaaaagtggcttaaagttaaaaatggagcgggtatttcgcttgaaactaatgcgaaaaaagttgcactacgatacaataaaaaggtgaaagcaatttatgaaaaaaaaggaaagctttatcgcccaagcttaatgctgttgcaaaatgaataaatgaaatgaaggaattagctgtgaaaatcgttcatttaacatatcctgttaaggaaaatattttatctactagaattgtgcttgcccttggcttttttgatggggttcatttgggacatcagcgcttaattaatcaggctaaagaaattgcattacagaagaaattgtcattagttgtgttgacctttgatcgacatcctaaggaagtttatgagtcgaaacgagattttaaatacttagaaactttggaagaaaaagctaacaaaatggcggaattaggagtagattatttggctgttttaccatttactaaaaatttcagtcaaatttctgcacaagaatttgtcgataatgtaattgtcagattaaatgctgataccgttgttgctggctttgattacacttatggttctaagaatattgcaaatatggctaatttaccccaattttccaaagggcgttttaatattgtagtgatgccaaagcaaacttttaacggtagaaaaattggctcaactgaaattcgtcaagcaattaaggatggtcagatgaaattagccactgaattaatggggcaccattatgtaatgagtggtatcattgggcatggtaaacgaaatggtcataagctaggctatccaacagctaatttgatttgggcagaacataaggtgattcctaaaattggagtttatgctaccaagactaaagtaaatggtaagtggtataactccatgactagcgttggctataatgtaaccattaatcaggacaagaagatatatattgaatctaatatttttgattttaatgaagatgtctatggtaagccaatgaagatcaaatggtataaatataccagaggtgagaaaaaatttgccggattacctgaactgaaagagcaacttgaacgagatgagcaagaaattagggcttattttaagcaaaagggttaagaagctacgtactttgaaaaaagtgcgtattttttgaataaaattagcaatctacttgatttagtgctaatttctggtatcatattaactgttagcacctgagagatgtgagtgctaaaagtgagggcgatataatatgttgaccgagcgtcaagagcttattttaaaaacaataattacagactttacacaaagtcatgagccagtaggctcaaagaccgtaatgaagcagttgccaattaaagtttcaagtgcaacgattagaaatgaaatggccgtgttggaagagcaggggttaattgaaaaaactcactcttcaagtggtcgaattccttcaagcgagggctatcgttattatcttgataatttagttgagccgttgcaattaccagagtctgtttataatacaataggaagccaattagatcgaccttttcatcaagtaaatgaaattgtacaagaagctgcacgaattctgtcagatttaactaactataccgcatttgcggaaggacctgagagtcatgatgttagagtcacaggatttagaattgtaccgctgtctcaacgacagattatggcaattttggttacaagtgatggtaacattcaaaatcaggtatatgctttgccacataatattcacggcgaagaaattgaaaaggctgtccgcatgattaatgatcagttagtcggaaagagcctaaatgaaatcaacgtttcgttgctaagtgaattagctaaaaacgaattaggcggcgaacatgtgactgaattgcttagtttagttgaagatgtcgtaaaagatgcagctagtgagcagatgtatgtggatggacagattaatttgctcaataatacttctgaacatgatgtaaatgacattcgttctttgtacgagttgattgatcataataatctgttcactaatttaatggatgcaaaggtggatccaaagtctggaaattattcagtaaaggttaagttgggatctgaattacccaatgatttattaaaaaattatagtttgctgacagctgagtacagcgttggctcccatggtaaaggaactattgctttacttgggccaacgaatatgccatattcacaaatgattgggttgcttgaatattttagaaatgaactagctaaaaagttgcttgattattatggcaagtttcaataaaggaggttagccgtgagtaaagaagaatttccaagtgaaaaaaatctagagcaaaaagaaaagacttctgagcctaaggctaaaaaagaagccgataaaggtgaagaaaagaagcaagaaaaaaataaacaagatcaaaaattagctaaagaattagctgatttaaaagataagaacaaggatcttgaagataagtatttgcgtagtgaagcagaaattcaaaatatgcaaaatcgctacactaaagaacgtgctcaattaattaagtacgaatctcaaagcttagcgaaggacattttgccagcaatggacaatttggaaagagccctaagcgttgaggccgatgatgatgtgtctaagcagttaaagaagggcgtgcaaatgaccttggatgcacttgtgaaggcaatgaaagatcacggtgtagttgagattgaggctgatggcgttaaatttgatccgacattacatcaagctgttcaaacagtagcagctgagaatgatgatcaaaaagatcacgttgttcaggttttacaaaaaggatatcaatataaggatagaacactaagaccagcaatggttgtagttgctcaataagagaggaagctaatatatgtcaaaagttattgggattgatcttgggactactaactcagcagttgcagttcttgaaggtaaagaaccaaagattatcactaatccagaaggtaaccggactactccttcagtagttgcatttaaagatggtgaagttcaagtcggtgaggtagcaaagcgtcaagctattaccaaccctaataccattgtttcaattaagcgtcacatgggtgaagctgattataaggttaaagttggtgataaggaatatacaccacaagaaatttcagcatttattttacaatatattaagaaattctcagaagattacttgggtgaagaagttaaggatgctgttattactgttcctgcttacttcaatgatgctcaacgccaagctactaaggacgctggtaagattgctggtttgaatgtgcaaagaattattaacgaaccaactgcttcagcattagccttcggtttaaataaagaccaagatgaaaaagtcttagtatacgaccttggtggtggtacttttgatgtttctgtattgcaattaggtgatggtgtcttccaagtattgtcaactaatggtgatactcatcttggtggtgatgactttgatcaccgtatcatggattggttaattaagaactttaaggatgaaaatggtgttgatttgtcgaaggacaagatggcaatgcaacgcttaaaggatgctgcagaaaaagcaaagaaggacttgtcaggtgtatcaagtactcacatctcacttccattcatttctgctagcgaagctggtccattacaccttgaagcagatttaactcgtgctaagtttgatgaattaactgctgacttggtagaaaagactaaggtaccatttgacaatgcattgaaggatgcaggtcttactgttaatgacattgacaaggttattttaaatggtggttctactcgtattccagctgttcaaaaggcagttaaggaatgggctggtaaggaacctgaccattcaattaaccctgatgaagctgtagctatgggtgcagcaattcaaggtggtgttatctcaggtgatgttaaggatattgttttacttgatgttaccccattgtcacttggtattgagaccatgggtggtgtcttcactaagttaatcgacagaaacactactattccaacttcaaagagtcaaatcttctcaactgcagcagataatcaaccagctgtagatgttcacgtattgcaaggtgaacgtccaatggctgcagacgacaagactcttggccgctttgagttaactgatattccaccagcaccacgtggtgttcctcaaattcaagttaccttcgatatcgataagaacggtattgtaaatgtatctgctaaggatatgggtactggcaaggaacaaaagattactattaagagttcatccggtttatcagatgaagaaattaaacgtatgcaaaaggatgctgaagaacacgctgatgaagataagaagcgtaaggaagaagcagaccttagaaacgaagtagatcaattaatctttactacagataagactttgaaagatactaaggataagctctctgatagcgatcgtaagccagttgaagatgctcttgaagctttgaagaaagcccaaaaggacaacaacttggatgaaatgaaagaaaagaaagatgctttatccaaggctgctcaagacttagctgttaagttgtatcaacaaaatggtggtgctgctggtcaagctggtccacaagcaggtcctcaaggcccacaaggtggtaattcaaataatggcaacaacggtaatgcccaagatggtgaattccacaaagtagatccaaataagtaatgggtttataattaaacaaaaggagaaaagaactacccattgagtagttcttttcttttgagaatacaaggagttcaaatagatggcacaagaagattactataaagtacttggcgtagatcgtgacgccagtgatcaggaaataagtagggcatatcgtaaattagccaaaaaatatcacccagatttaaaccatgaacctggagctgaagaaaagtataagcaggttaacgaagcctatgaggttttgcatgataagcaaaaacgtgcgcaatatgatcaatttggttctgctggtgtaaatggtcaaggtggctttggtggtggagctggtcaaggctttggcggtgccggatttgatacttctggctttggtgattttggcgatatctttggcgatatttttggtcaaggccgtcaacagagggttgatccaactgcaccacaacgtggccaagatttggattatcaattgacaattgattttatggatgccattaagggcaaaaagacccaggtcagctatactcgaagcgaaacttgtgaaacttgtggcggtaatggttgtgaaaaaggtacacatccaattacctgtgataaatgtcatggaactggttatatgacaattactcaacaatcaatgttgggcatgatccgtcgtcaaaccacttgtgacaaatgtcatggtcgtggtgtgattattgagtatccatgtaaaacctgtggcggtaaaggaacagttgaccgtaagaatactattgaagtggatattccagcgggaatcgacaatggtcaacaacttagatatcaaggccaaggcgaagcaggtataaatggcggaccatatggtgatttatatattaactatcgaattaaaccatctaaagattttgagcgtcgtggccagactatttatacagaagtaccaatctcatttgctcaggctactttaggagatgaaattaacgttaagactgtgcatggtgatgtaaagctaactattccagctggtacgcaacctaataagaagtttactttgcgtggacagggtgtgccatatcttcgtggtaatggcaatggtgatcaaattactacagttaatattgttattccaaagcacattaatgataagcaaaagaaagatttgaccaactttgttcatgatggtggtggcaatattacaccacaagaaaaaggattttttgaacgcttaaaagataagtttaatatgtaaatgctaaaaaggtttctgctacttgcaacagaaaccttttttaagatcaattaattttttggtgatttttagagtttttcttggaaaatattcaatgctgaattttcaattattattctaaaaactctgcattttattgaaaatttactatgctacaatttcatcatttattctagctttgctataattaatacatagtaaagggtgaacgattttatggatttaaaaaaattaaaagactatcaaaaacacattcgaaattttgctattgtggcgcatattgaccatggtaaatcgactattgctgacagaatcttagaattaactgatacagttagtcaacgtcagcttaaaaatcagatgttagatgatatgccacttgaacgtcaacgtggtattaccattaaaatgaactcagttgaagtgaaatatcatgctgaagacggtgaagactacattttccacttaatcgatacaccaggacacgttgacttttcatatgaggtatcacgttctctagctgcctgtgaaggtgctttaatggtggttgatgcttctcaaggtgtacaggctcaaactttggctaatacttatttggcaattgatgacgatttggcaatcttgccagtaattaacaagattgacttaccatctgccgatgttcctaagactaaggaagaaattgaagaaatgttaggtttggatgcttcagaagctgccgaagtttcaggtaaaaccggtcaaggtattaaggacatgctggaaaaggtagttaaagatattccagctccgtctggtgatattactgctccattaaaagcattgattttcgactctaaatatgatgattatcgcggagtggtaatgtctgtcaaaattgaagatggatctattaaaccaggcgatcgaattcaaattatgaatactggcaaggaatatgaagtcacagaggttggtgtttctagtcctcatccaattaagaaggatattttaatcgcaggggatgtaggatatattactgctaacattaagtccgttcgagaaacacgtgttggtgacacaattactcaagctgataacccaacggctgaaccacttccaggctatcgtcaaattccaccgatggtttattctgggatgtacccagttgacaaccgtgattatgaagatttgaaggaagctttacaaaaactacagctgaatgatgcagctttagaatttgagcctgaaacttcaacagctttaggctttgggtttcgttgtggcttcttaggcttacttcatatggatgttgtacaggaaagattagagcaagaatttgaccttgatctaatcatgacagcaccatctgttgattatcatgcaattatgaatgatggaacaaccaaggtgattgataatccatctgatttgccagatgctggtgaatataaggaagttcaagaaccttatgtaaaagcggaaattatggtgccaaatgattttgttggtccagtaatggagctttgtcaacgtaagcgtggtgaattcgttaccatggattacttggataagtaccgagttaatgtaatttacaacatgccattagctgaaattatttttgatttctttgatgatttgaaatcttcgactaaaggttatgcttcacttgattatgaaattacgggttatcgtgctactgatttggttaagatcgacattttgcttaacaaggagccaattgatgcattgagttttattgctcacagatcagaagctcaagatcgtgcccgtcaaatgacttcaatgctaaaaaaactaattccacggcaaaactttgaagttgatattcagggcgcaattggagctaaaattatttctcgagctacaattaagccataccgaaaagatgttacctggaaaatccatactggtgatccagatcgtcgggctaagctgcttgaaaaacagaaacgtggtaagaagcgaatgaaagcagttggtagagttgaagtacctcaagatgctttcatggcagtcttgaagatgaacgatgatgacatcaaaggtaaataagatttgctagcattcccaacctgacgcggtttgtcgtcactctgagaatgctttttttgcttttctactgaaaatctactgaataaatatctttaaaagttcaaattatcaattgatcctttaatatctttcttttgttttttagttacgtgtgtgtaaatttccatagcagtcttagaagttttgtgcccgagaacgtactgaacatcttttggagtaattctttcattaccgtcataaagtagtgtagcaagagtatgacgcagcccgtgaggggttatcttacgtaaaggctcttttttatcgttgggatgttccttattccatttttcgcattgctttttgtcaaacttatacaagtacttcaaccaaaagtcaggctgctgtgcccaattgtagctaccgtctttggtgtgaaaaatccattcacagtggtcaccgatttcatcgcaatattcgcggtattctttcagaatcatataaagattgtctgacatagggactgcatggtgaactccatttttaacgtcatcaatggtctttttgccgttatcatctttggcgacagttcgctcaatttttacaactcgtttgtcaaagtctacatctgaccatttgagtgcaagagcttcaccacgacggcatccaagagatgcaactgtgagaaaataagtatatttcatgcggctataatcacgggctatatcaagaaaatgtttgagttcgtccaattcgtagaaattacgtgaattatctcgactagattttgctgactttttgggcatgattacgaagtcaaaagggtctttactgcaccagtgacggaagatagcatatttgataattctgtgtaactgattgacaattgacttgtaagttacatattttgaagcaagatcattaacatatttttgtacatgatccggtgatatcctgtctatgtaagtatcaccaaattctggctcagtatgatttttccatgtgtcctttaagcgtcctagtgtggaaccacgcacatcttgcttcattacttcaagccatacattatatacatagcttacagttatcttcttttgagctgtttctatcttttgacttaatgcacttggtccttgtgcctttaaattgcgacgaagttcctcggcttctttgcgggatttgagtttgcttctggtaacgtttataactttaccagtttcaggattaataccgatgtaagtcctaagtcgaaaatactttttcccgttttttaatttatactctgtaatttcagggtcttttttacgagccataatatcattcctttctaaaaatatttgatgatgcgcgctcggcacgagcgcgcatggggcgcccgcgggttagattatctcttgttgatttcatgaatcaaaagaagtaatattattaatgtcaagtttaattcgttcatgtttttcacctccaaggtggagaacaacacaagcttgcttgtgttagacttggaaggtgacaaaacatgagtgagcgggcgccccaagagctttactcaaagggatgcaccgtataagaagcgttgctgtgtcggcaatgcttcttttttgctataatgaattaaaaaaggtggtaacagtatgaacgataatgatttctttgtagtcagttacaaaattcttagctatttaaaatattgctatgaaaatgataagagagtagatccaactattttgagtgaagggatgctctcaatttcaaacaatcaattcttgaaaacactaaaaatgttaattgatcaagggtatattgacggtgtgtatgtaaagcaaactcttgatgggatgttcgttttaaacaatcgtagtaaggcagcaattactatgagtggtttagattatttgaaaaatgatcgctctatgaaagaagcatttgaacaattgggaccagtacaaaagtggttgccaatcatcaaataatttaaactgatgttctttaataccgtaaaatcaaagcctacacacctgaaagggtggcaggcttatttttatgcgtttctaaaccatctagtagatgatcctttgacaatatgagtgcctcgacctaagtcgcctcttacttcgtaataatgattattgccgaaatatctaacatcgacgtaggatcctttggcaagccagaagctaaacttaggtgctttataaagcggatatcttaacttatatacttttacgtctttggttgttttaacttcatgccaatgccacgaatgtttactgatagcttgcacgggttgtgccgtaactgctgagactgcacctgtaccaccgagcaacatgatagatgccattgctgtaactaaaaatctatgtttcatatatctatatcctccaaaatagatattgccttaggtttatagtcgctggcgttgtggactttgatataatgaatgaaaaggagataggcaaatgaaagatgacattgaaactattaaattatatgtaaaaatcatattttacgaagtcaccatcatgtttggctggtggttgtggaatattctgggaatattgccatttcactgattccagcctaactcgtgacttaaccatgctataattaatgggataactattaatgtaatcacacttcaaaagatttttttgattttgccgttaatctttgaagtgtgtttttttatataatcttgacctttatcagtaatgtaatagccggtaatagcagggtgaccgccaacgaatccctcattgatgtctactaagccttgctttttaagttttaacaccatcattacttcatcattattgccattaagtgcagcaaaagcatctttattttttagctggtgcacctcaccatcactgatagacttcaaaaattctaaaatgtcgttcatatatttcacatcctttccagccgcgcgtgcggctttttctaatattccgacagcccaccatgaggcgggttgtttttgtcgtaatttataactaagttgaatatcttgaaatcgttgtctaaaacgttgaatacgtcttgcttgtttccagattcttccgcacttagtaatgctaaacctattcgatcatcacaggcgaaaagctcgggcgactcaacatttttcaaagcttcctcagcttcactttctgtgtagtcaagatagttagttaagattcttatagtagatttatcttcaatctgctcatataaacgagcaataaggtaagttaagtatctaggtgtgtaatcatcatgcatatttatgtctccttaactatgcaatatcagcaagtaggtaataacattccttgggaattgcaaaacttctagcaaactgataaatgctggtgaagtggaattcattttcaatgcaatactgttgcaataacttgatagcaaagaagttttcttgcgcttcacctttacgattagttatgtcgttcaaattaaagtatgattcttcctcgtgtagtacatgtccgatttcatgagccagcaaaaaaggagtgtgagtaggaaaaggccatctagaattcataattattaatctgccaggttcgttatagctaactgatggagcatagggcggtaatttataagtaaactcgataccaatgtgatgatcaaaagcgtaattcattagataccgcatcaatctgtcatagtttgagcgtgtctctaatgacatttcttctatattagtcatagaatcactcatccttatttagcatttcagggtgacgcttgaagtagccctttgctatatccgcataagtgctttttaattcgtcaggtaatttgccaccgtagggcatcggcatgtccagatctgaccatgtgagagcagtgccatcttttgctgtgctttctgaactaggattatctgattttccagttaagtagtcagttgtagtttcaaataatgctgctatttgattaagcatttcataatcaggctcatgcagatcatattcccagttagagtatcgttgtgcactaacaccaagcatttgagcagttttagatttactccatccttttgagtctcttaaattctttattcgttggctaaaagtactcatatcttgcctcctatgtttcaataattaatttaattgtagtctcaattaaagaagtagtgtatatttttaaaaaatatctgtaaaaaagtattgcattttaaatttatggtgttagtataaatatgtaatcaatttacagagaaaatttaaaagtgaggtgataaagtggacgtagttagaaaagatgctggaaagatctttgaacaacttgtggcttcaaaaggaattaaaaagaccttcattgcttctaagatgggaatctctcctcagtatctaaataacattattcattttggaggatttaatgcagactttgcttttaaagctgccaaagtgctagatgttaatcctagtatttttttgaccaaaagttacagagaaaatttaaaaatcaaatagaaggtgacaagaatgaatcaattaacattattcaactttgaaaattcacaacttagagttgtgaaaattgacggtgagccatggtttgtcggtaaagatgttgctcaaattcttggatattctcaaccaagtgttgcagtttctaagaatgtgcctaccaaggataaaggtattactgaaatggaaacccctggaggaaagcaaaaagtgacaataatcagtgagccggggatgtacaagttgatctttaaatctcatgcttcaaatgctgaaagatttaatgactacgtagcaaccgaagttcttccagccattcgtaagcacggagcttatatgacggatgaaaaagcgttcgatgttgtccacaacaaagatggcttagcaagtttgttacagcaggccgcagatcagctaagagagaaggacattcaaattgaagaaatgaagcctaaagccttgtttgctgatgcggttacttcaagtaaatcaacagtgttgattggtgatctcgctaagatgattaagcaaaatggtgttcatcatcttcaaattgtcgaaaacggcacaaccaagacactaagcatggggcctaacaacttgttcaagtggatgcgtgcaaaccattacttgattgctagaaaaggttctgattacaattcaccaacacaaaggtcaatgcttctaggtctgtttgaaattaaagaaaagacgattgtccattcagacggtcatacaactatcagcaagacaccaaaagtaacaggaaaaggccaacagtactttatcaatctatttctaagtggcgaagttgcataaggtgttcgagtttatcaagcaggaaagagagcgatggacatgaagcaagacgaatggaaatcaaagccaatcatagaaataactcagaaagacgtggaaagaatgacactagatgagttaaagagaacccaagttaatttgcttattgaacggttatacgtagctagttatgatgactggtcaaaatatgcctatatgtcaggtttggttgatggtgaattaatcagacgactgggataaaaaaagagagaaaaaatgaaattcagtaaatacaaaaataagccatctcatgaagatgacttagacgaaaagatcgatagatttaataaaaaagcttactgggattatttgattcagcggtgctgctttttgtattttgatgtatttctttaataattttctctcggctggcaaagtctcgtatttatgcataatcattctcctaacattaaagattcgatatttatttcattgtatcaaaaggaggagtgagcaaaatgacagaagacaagatttttgatgaatttaaccaattgattaaggacttaaccgacgacttgatcagagatacagatgatccatattcggattcagttgatacagctttgacaaaagtaattagtgcaagaagaagctataaatggaaaaaagccaacgatcaaagaatcgctgacttcaaaaaacagaatcctaatgaggatcccggaaatgcaaaagtagaaatttcgtctgaatattgatgagattaaaaaatatctcgatcaactttcatgtcagtataggcatctgaattgatgcggaagttctttctcaattcacagacaaagaatgaatcattcttatctaaaactgatgaaaagcactctctaatttttgcaggactaagagtagtttttaccagccaaacagatttttgaatttcaacattgtcgttgccagaaattgtagaaattacttcctgaacattttcatacttttgcccaggtttcattagatcgtaggcaataacatatgatgccatgatatcacctccttattagaggatgacttaattttagcagaaagaaggaatagcaatgcaagaactaattaaagttacggttcaaaatgatcgacaacttgtttcagcaagagacctacatgaaggactaggacttaaaaagaagtttacagattggtggaaacaaaatagtaaagattttgaagaaaacgtggattatacgacttcacctaaaagtcacgtcgttcaaagtggcaatggaacggtaagaagatacgatgactacgccttgacaatcgacatggcaaaacagctttgcttgatgagccgcactgaaaaaggcaagcagtaccgcaagtatttgatcgaagttgaacgcaagtggaatgatccacaagagattgtcaaacgtggatatgcaattctgcaaaacgaaaacacgcaactgaaattggagaacaagaacttaactgtccaattggaggaatccaataaaaaggctagttacttagatgtgattcttggagcaccagacacactagcagttacgcaaattgcggcggattacggttataacgctaaggacttcaacgaattgcttcacaaggtaagaattcagcataaagttaacggtcaatggattttatacaaggtttacatgggtcaaggctatgtaacaactaagccgtttacctttatagatcataaaggcagaaccagatcaaagccatcaacgtattggacgcaaaaaggcagaaagctaatctatgacattttaaaagataatgacattttgcccttgattgagcgcagtgacatcgaataaggaggggctgagatgaacaaagacaagattttcactgaacaacaaattgaagtaattaaagagattgttagagatgaaatcaaaaaagctgacaagcagcgcttatcagctttgggtcaagaacttaactttaatcctgatgattattaataaactcagtgcttttatcagttagtttaagccaagtgaatccacaatcggtgcaacgaattaaatttacgtacagtgatccgccaataagattgtcttttctcattacaactaaggcaaaagttgttggacctttgccaattgcaatcggcttaacatttactgattggtattcaggacaatgcagtttattcattaaaatcacctcctttattggagatgactcaattgtaacagaaagcaggtgaggtatatggctcttctaagcattaatgaggaagaactagacagatttattgctaagcgagttcgtgaaggtgtcagagaagagctagcaaagcgcggagaaattaccgatcaaaaaatgttcagccgcaaagatgcatatcactatcttggtgtaagtggctcgtactttgataacgcggtaaagcggggatttatcaatccgagcctgccaggtgacggcagaacgagatattacttgcgcgaagacctggataggttcgcggaagacgggaaagactatttaaagaaagcaagactttaaggagaaaaagaaatgaacaaagatactgaattttcaaaagaaaagatggccaagcaagttgcaaagttgtttagcaaggttaatgaagacagcgcaattattatgtgcgtcgcaaatggatgtaatttaagtgaattagaatatggcaatccgttcgttttagtgggggtaatccagcatctaaccgacgaaatacgtgagcagattaaaaaatgcctaaggatgaagccgctccattgataagggacgctctaacgaaagaattaaaggggttacaagatgactaagaaggaatacgaaagagaatacggcaagacaaagcttgaccacgtgctaagccatatgaccattgcattcggtaaaatcctggaattcatggcaattctatttttaccatttgcgattgtagagcagctatgcatctacggcgtaacgcatcccgaccaaattatttcactgctgctggtcttgatgatcattctcacagcgctgtcggtgcgtgccgttaaaaagttaagaaagaagtgataataatgcaagctaagctttttggcatgcgactaatgcgcgctagaaaaaatcgccagctaacacaattacagctggctgaaagaattggtacaagcatgacaacgattagccggtatgaaaatgggttgtcttttccaagtaaaagacgacttagcgagatcgctcattttctgggcgtgaaagttgactggctattaacaggatttaaggaggactaatgaagctatggtacaggttcatcaattcggtgtggcgtatcaaagagcaggtaagtacagcgagagccagcttatccttgtggctaacagtaacgctattagcggcgttagcggttctgattttgcgactatgccggtagaagtaaagaagattttaggtattaaaaaagcactcattgagtagcattcaatgagcgcaaacattaaacaaagaactaaaggaagtataacacatggactcatataaattaagagacattggtgcaactgttagcacctttggtgatgaatatcaaacgtttagcgatgttttaaacgacatgattaagattgaccctagattggatattaacgacgtacaggaccttgtagacacgctagggggggtatgaagacttcgaagagagtgcaaaagaactttgcatgaagaaacttgacggagtaaatgaagacgacgatgaccccgaagccgaatggggcgatcagatgtattgccgccaggctggaaagtaagtgctgattatgcatgatgcacaacaatggctagacggaatcatcgaagatatccctaatatccgcaaagaaatgctggacgactgtcgcactatgaagacctatggcaaggcaaaacagtacgctaggcagttccaaattgactttgagggtaattataaggctacggcagaagaacaagcacagagcttatttaacagccttatcgaggacgtagtaacagaactcaatcgagaatctgacagaggagagattaaacatgactgaggcaacaaagctagcagaaatgacaaaagatcagctaattaagatagttgaccagttgcaggatgaaaagaaagaacaagccaaaaaagacaacgctagcgtttatgagcgcttgtcaaaagtagatgtttctaagtttgttgataaaaagaatggtcttaattatctaagctgggcgaaagcctggggtctggtaaagagtattttccccgatgctagttataagctgcgggaatacccatattacacacaaacagcagacggtaattatcagcagattggtacacacgattacttacgtactgagtacggcgttgaagttgaagccagcgtaactattaaaggtgagacatatagttcaaagctttatgtcatggactttcacaatagggcacttgaccctaaaaaagttacttactttgaaattaataaaacgcaaatgcgggcgttaactaaggcgttagcatttgcggggctgggtttgaacatttacgctggtgaagatttaccaagtagtgaagaaaagacgccacaacgcaaagaaagagtgaccgagcaagaactaattgaaaaagcaagaaagagcaaaactcagtacggtggtggcaatgaattagttaccgacattgtgggacttgaaatcgatggagacaagcaagcaaatgcttttttaaaccagtggtgtgaaaaagatcagaagaacaaaaatttatataaattcattattaagaatcagttagctacacacggtatgaaggtaggagcataaatatgagtgaaaaacaagtatttgaaggttcaagagctttcttgatgattccaccagctattgcaagagataaagagcttttaaaaaagccaaaaacaattattttgatgggtgaaattatctcaatgctcaatgttaccggcgaattttttatgagtaacaagaaaatagctgaaaggcttgatgtatcagcccgtaccgttaacgaatatttaggaatcttagagtcaaaaaagttaattgaaagaactaagataattagtcaagaaaacggcgcaattgtgggtagacaaatacgtgctggcgtagacctagtgaagcccacttcacataaatataacagtaataatagaacaactaatagaacagtagaagatacatatagttctgctgacgcagaaccacctatcccttacaaagaaattattgattatctcaataaaaaaactaatcagcatctacgctatcaaaccaaagcttatcagaaattaattagacaacggtttgaggaaggtgcaacgctagaagacttcaaaaaagccattgataatcaggcatatgcatggcaaggaacgaggttctggaaatatatgcgaccatctacactatttcaagcatctaagtttgattcttatgtgaatgctaatgacttaaatcaagcgaaacagccgtctaatggcggctacggtggcgagccaaatataagtgacattccagacgatgatttaccgttttaaaggtggtgataatgatgcaaggactagaaggaattgcaattaaaacagaaaaagcagaccaagtatgtccaattcataaaactcaaatggtgctagaccgcaaaggcaagtcattttgtattgaatgtatgaaagaacaaactgaaaaagaaaagaatgaccaagttaaacgctttatgcatgacaaggtcactaagattttacgtactagaagcttggtagatagaccagaggacttagaaaagtctttggaaaattacacggctaaaaaaggatcacaagaggcttcaatgggtaatgctgcttataaaattgcccatgaactaattgataaccctgataaagcgatgacaacgttgatgtatggcacgccaggcgagggaaagagccatttagcaatgtcaatccttaatatcgtaaatgctaaaagcaatccaccgcagacctgcttatttatagatgttagtaagatgtttgacatgatttatgaatctatggaagatccaacgagctggtggactaaaaagaatgttattaactttttaggtagtgtaaatgttctagttattgatgatctaggcagtgaatcgtctatgcgacagaatgaggcaacggaagcgacagaatttaagcaggacgtattaaaacagattcttgataagcaaaagagactaatcgtgacaactaatttgacactgtcacagttgcaacaagcatataaccctaaaattgttagtcgcttgttatcggattcacgtggtagacgtttagattttacaggaatttcagataaaagattggagctataacacatgattaaaattgttgaaaagtcagaaaaaaacgacttattggaattaaatgttaatgacacaatttgctgttggaatgatgatgcgtccgttgataagaactatttaatggtcacgaaattaaatgactatgaagacttagaaaagccttatacactcattgcacttaatgccactcatgagcaatgtagggcaactaatgaaaacgacgtgctagataaatatttttattcaaatcttgacgatttagcccgagatatagcgaacaactgcgatcatataaaaaaggtggatctagtggcaacagcaaaggagcataacgatgacgaagattaaggtagtacagccaccatgtgagtactgtgactttaaaaacatgaatcgagccgcatatgcatttagagaaaagaatggcaggtttggtggcttcttgtcgctaaataatgatggatcctttgacatcaatcgagggatgtataagacagaaaagaaaccgaatttttgcccgaattgcggtagagatttaaggaaagacgctacacaagataaagataagtaattgagaggatagacaaaatgagtaaatttaacgaagccagagccaaaaacattgaagatttaaaaaaggtcgttaagggagaataacgatgaatgacttactagctatgtgccgtatgctaaggttatcggcttgatgcccccgggtattaatttcacaaatcgacaagaattgtttgatttgctgacagagatgaaggtgaagatttatgaactgtaaaagattaaccggacatggacaagatgaaatgatgttccattgtgatagttgcggagtaaatatatcgatagacacttacgatgttttaacggcagaagacaacttgcattgtcctctttgtggcgcaagcgccggtcatttatccgtctatatgtttgatgaaaagaaactaaagaaaattgatggcgactttaatgtgaaaattgaaggggataggatttgcatttatctttgtgcagttcgcttatatgaattatatggcgaggataacatggctatttatagcgtttatttaaaagtggagaaaatggctaagactgtggaggcaattttggacttttcacggaaattggatcatttaaaggagctatacaaaaatgaaactatttaatgacttgaaaaagctgtattgcagtccggacgaactagaagtaggcgacttcctctattgctggataactaacacccattatcgtgttttgagtgttaacggatcaagctacgtgactattgagtgcgttgagaccggatggacaacaccagtagtgcccacaattgataacgcattagaagatattttggctcacaatgcagactttgacctaaagcatttgacaaaagttaaacctaacgaagtttacatgatttttagcagaaagtgagggattacatggcagtagtaaacgaagtaatgacaataattaatgtgattatgtcatttgcattagtgattttaatttttatctccatacgtcagaatataagattctcacgtgcaaccaatgcaagccttgacattctgtttaaaaggcaacagctcctgtcggaagacttggatcagcttcaaaaagcattaattcaagtccagaaaggtgaagtagctaacgctaaatctatcaatgccatagcaaggcaaatgactgagttgcatgaccttgttattgaagatcagacaagacaagaccaggacatcaaggcgctggcaacgcttataagcggcttgaaaacgtccagctatcgaagcagaaatgataagcattttaacaatgctttaaagaggattgcaaagctggtgaaagaatgacggttaattgcatcaagtttgtaatacctggtgagccacaaagcaaggaacgcccgcggacagttcgtagagctggcggtgttagaacttatacaccagcaaaaacgcaccgatatgaggatattgtgagatattttgcagtttacgccagaaaagaacacaagataagtgagccaatcaactcacagtgtggcgtgtccataaaagcctatttcggtatccctaagagcttttctaaaaagcgtagggaattatgcttaaaaggcaaagaacgccccacaaagaagccagatagcgacaacatcgcaaaaataatctttgatgggatgaacccaaagatgaaattaaacaaagcgctacacaaaaaaatggtgctgcaagatggattttatgaagacgataaattaattgttacgcatagcgtggagaaatggtattcaatgcatccccatgttgaggtaacagttacatgggaagattaatgacggagtgatatacgaatggcagatagagcagagcaaatgacgctagatgataatttagaggttgattcaaaggcaaccgcaaataacgtgaggaattttcttacgtttaaatttgagcattttcaaaattatgcaggtttaaatgtttctgatctgtctgttgttgatgattcacacctatctagccccaaaatggacgcgtcaggcgtttcatcgcatggtgggataaatcatactgagtcaagttttaaccgcatcatggaagcagaacaagcatgtaaagcaatttacaaaactataaaaaattgtagaaatggcggcagaactccatatcaaaaaatcttgtctgaggcttacttgcacaacatggaggactacaagattcagcaggaactaggctatgaagacagtcaatattacatcaaaaagcgtcaagctttgtgtgagtttgctgacagattcgaaaaatggaaagactggtatagcatcccctaccttaaagaccttcacatttaccgaaaaaacaaaaacggagtttaaacggacttttgtcggagtacaagcggagtgaaatggctatattatagtattgtcgaaaatttaggaagcagggttttcgactgatggagtaagaagtacgataacaacttatacgagtcttgaataaacctatatttattaaaaatctccgattaaccagtaacggcggctggcgccctagaccaggttcgattcctgatgctgttgtagcccgtttattcgggcggaatggcaattctaattccatatcccaaattttataatcactttgcctcattcgaggcattatgagctagcattcagtgtaatgccacatacgttttatataattgcctggtgtggtgaggctcaactcctcactagatcttagccggcgtggaaaaccggcactaagtataataatcatatttattaattgcataagcaataaattgaattttactcgtctagtttgggactgtgtcccagaggtcaaagcagtagtgttgaggcacgttaaatttaagtcattaacaatttcaacttggtgcttttgagtttttaacttgaaaatgttgcaagcaccaagaaccatggatatggtatatcactgaccaagttggtcacgtgcgggggttggattccctccctgcttatatgaggaagcgtgtgtataaacctatgacagggttcacgccattcaatctataaatcgacagcgacgttctgccgggataccgacggaatttcagacaagccaaagggtaatagctttggttgacctacaccgaaaaggaaataggtgtcgttggttgagtgagaaagcattaaattattgataaagtaggcaacaatgtcagcagaattacaattgccggcggagatttaggcgctccgtgtaaagcagtctcacgctaatctggcagacatgtcagggaaccacgagataaatgtaagttaaaattctggtccacgatgatccgcagaaatgcgggtataactgatacgtgccgtacgagtagcccaaaacgtggaaattacaatacaggtttttgcataaccatcaatcgcattgttgggtgaaagttggaggataaatcctcaccaagatttaaattaagcaagagatataaggtcgctccttatattgcgacttgcttaaacttgtgactgaataatcaacgatttaacaagttcaagtggttaatagccacccgcataactaggaatatagccaaaacggtaaggcaacgggctttggtcccgtaatttgttggttcgagtccagctattcctatcgtcggttcgaagctagcgacgtataaaataaagcaattatgtgaggcaataaccggtcttacataaatggttaagttagtcacgcacaggcgtgcaaatggtttgttagtccagaggtctagggcaccgcactgtctatgcggaaacgtcggttcgattccggcacagaccgttgaggttagttctgtgaacaaagtcggtggaggacgtctgcattccgacataaagcagagaagactaagagtcacggaatcgtaaaagaggaaaagcttaatgcaagcatcttgcctcatttgatcaggtagggagttagctcagatggtagagcgttgcaaggatcgtgggttcgagccccacactccctattgggctgcaaaagctcaaatatatgctctttttgaagttcaaaatttattcatttctaacccttctaactgttatccatatagttagaaaaccacagtcgtactgtggcttttagactcattgctaagcggcaagcggctagtctccaaaaccagtaatctaggttcgaatcctggtgagtctgtcatcatggtggtttatgcaaatggctaacgcaagcagtctgtaaaactgtcgccgaaaggctttgtaagttcaaatctttcaaccaccataaaattaaataaacattgaagacattctacgctatgtgtgatgtcttttttgtttccagggagtaaaaatgtatcacaagaaaccagacaagccagataaatcgctagccaagtgggttgaagaaaagaacagcaaggctacaccaaaaagaagcggtttttggcacgaatcgaaatatcgcccaccagaggacgacatcaaagaagctgaaatcaagcaagatgaaccagaattaatcattcctataccgaaatcagtagtgccaagcattgaggactacgagagcacgtttttgcataaggaggatcaagaaagtatgcaaaataagacattagtcagcaagttaaccgatgaaagacaacatttacaagacaatttattaaagattgatagcaagattatcaatccgctaggcgtgtcagactatcaggttaaattgttgaagatccagcgtactgcgatgatgaccgtggtcaacgtcttagacatgcgtatcagcgatttaagcgcggaaggcgattaaatgaccccagaaaagtattacgagcttagaaagcattataagctggtcaaagaagctgaacatttagttaagtacaataccagcaacaaggcagtagacatgattaaatttgtggcgtttaaacaaaaagcgggcatgatgccacaagagtacatagaaaagtatggagattcatggaaggactaagacacccgctgacacaagaaaataagaccataggtgaggccgtggcacataaacatagaagataccgcggcgttaaaaatccgcttagagggtcattattagagcgcagaatacaacgcgccatttattgtgttgaaaatgacgtagataaagaatttattgattggtttgtcgctgatacagggatgcaaccacaagaattcttagacaaatggagtaaaaaattaggcatatgaaaaatatgacaaaagacaatatggagacaaatcctcgctttaaaaaggctgtttttgtaaatcattacatgagtgaagaggatattaattacttgcttcccaagtaagttaaaaataagttaggagatcaattaatggtggaagaaacgactcgtttagcagaaaaacaggtgcatccctgaattaaagctttttggctctggcgaaactacgatcatataacaaataaaggctattcacctcccgtaattaagtgaggaggtgaatagccttgtcagaaattattcttactttgatcattatacttctgataattgttgcgatcaagtcgtaacgccagagccaagggcgctcgcccttgtgcggtcgagcgccgctaataatataaaagtattgaattgaatataaatatgcgttgctgagagatgacgcttattttttatgcaaaaaatcttttcaattataaaaagttagatggaaacattactcaattcctaatttagctttaataccatctgctaggatggctgaaaaattaagacctgcctctttaccttcttcatttaaatagttagggatggttaaggtctttttgactacacggttatcattttttcgcttatattccgaaatattaacagtaaccaaagtagcaatttcattgtttttggttttaggaattttagcatttgattcaggtaaatcttctaccagtgacatggttccgattaaatctttccccatatcaattgcttctgcaatagttcttccttgggtatcacggtcaaggtctggaacattgaccgtatatttgattttagggtcatcagttggagttataacgattggaaatacaacaattttatcttttttcataattaacaatttaagatggtacacgaataagggggtattgccccttattttaccctttaagattatttcgcttcataatcttttcccaagtgactttgttaagatcaccgtggcgagaaattgattctgaatgatgaccgttggtataaatatcatgattatgaccatgacggtcgaaccaccagccattttcctttaaaactttaagggcatctcttctttttaccatcttacttctcctttcacatattataatacacgtgtttaatacgtatgtcaatataaaatgcagattagtttaatttttttaggaggtgaagctagttttggcagagcagaagttaacaattaaacaaaagaagttcgccgatgaatatgtcaagactggcaacgccacagatgccgctattaaggcaggatacagcgaaaaatatgctcacaccaatgctaataaattactacaaaatactacaatcaaagcccgtattgacgctcaaatgcaaaagctcgaagacgacaagattatgaaggctgatgaagctttgaaactgattaccgcaattgcacgtggtgaagagactacgacggttgagacaaaagacggtttttggttgaccgtacacccaactatcacagagaagcaacgtgctagtgaagccatcttgaagcgctatccattatctgatatggataaagcccagattaagaaggcacaggcagaagccattaaggcgcaggctgaggcacaggtagcaaaggcaaaagccgaacaactccatacggttgctgacaagacccgtgagaagatggacaagctaagcactgaggagttacgcaacttagccaagttagcaggtgaaaaagatgattaagctgacagccgccgaaaagaacggaattgcattagcggcaaaggaatcacttgcgcgtagaagttacagtgattactttctgctggctaatcccagcatgcggatgtatccacatacaaagctgatcaccgagaaactgcaaaagatagcagacggtgaacagcatttttacataatttctatgccgccacagcatggaaagagcttaactataacgaaaacttttccaagttattatttaatgaaatatccagacaagcacgccatgatagtcgcttactcacaagacttatatagtcagtttgcggcaagcaacaggcgtgctttttctgattggtcaggggcgctattcggattaaagacaggcaagaacacagctcagacatttactgtacaagaccacagaggtggtttctatgctacttctgtgcttggtggtgctactggtatgagtgccgatttgctggttattgacgaccccgtaaaaaacgcagaagaagcgcattccatgaccgtcaaggacaagatatgggacgaatggaatttgacgttttacccacgtctgcaaaaaggtggctcggttatcgtgatcatgaccaggtggcaaacagacgatctagccgggcgcttattgtctgaatcatccctaccgtgggaagaagtcaaactgccggctatcgcagaagacattccagccggaacaactgatgcaattggacgcaagaacggtgaagccctgtgtccgcagctgcacacgctcgatgaattgcttacccacaagcatgatatggggacggtcaagtttaccgcactgtatcagcagagcccaattattgagggcggtaacatcttcaaagatgagtgggtcaagtactacgtggacagcagagaaacgcaggcaaggctaggattaaccgataaagatgcggtgattctaccacatcacttagaccaaaccgtacaagcatgggatgcaacttttaagagtaaggctaatgacgactttgtagccggtcaagtttggtcacgccgtggtgccaattgctacctgcgccctaactggtgccacaagcgtttaagctttactgagacgctagacgctattagagccatgtcccgcatgtatcctgacgctactgtaaagctagtggaggacaaggcaaacggtccggcaatcattgacacgcttagacgtgagattccaggaattatgccggtgtcaccaggcgcagacagcaaggaagcacgtgcggcgtcagtgtctccaatgtgggaagctggacaggtttatataccgcatcctgcatggcacccagaagttaaagactggattgctgaaattttaggattcccgaacatgccacacgatgataacgtggactcgatggtatacgcattaagacgacttaacacgaagtttggtggtccaattgttagatactaggaaaggaggatgtcaatggccaaaaagaaaataaggcacttcaaaacgccagttgtgcggtctgattcgcttgacctaagtcctacggttgactatgaatcaattgcatggaagacagttaatcactcacaggactatgaagccttagacgaccgatacaagtatgatgctatcgctcataaaatggtctcaaaggtcgcagaagacgccacaagaaacggattccgtttagtcattccaggcaaaccagacttacaagagatgtatcagaatcgcttaaatgatttgaaaacgcaacaggttttgtctcagcaaatcatctatcaacgcaaacacggagatggctatataacctacctagttaaagagacaaatccaacgagtacatttgaccctcttgaccctgaaaacatcgagaatgtggtagcattgcacgcattcggtcaaaagaatgtacaaagctatctaaccgacgatgatccaacgagtgacgactacggcaaagagtcaaaattgaagattcaaccaaaacaagccgccaccacattagacaggtacggtaatccaacacaagaaaccaaggacgaaaatgcgattgttcttgatgctaccaggtatagtcacatcagcttagacaagtttgacgatgaccaaacagggacatcaattatcaagcgctgtgaaaagcaactcaataatatggcgattgctaccgaatcagtgggtaaaatgctacgagaatttacgtttaaggtcttccaatctgataggctgattaatgaaccattagaccagttcagacgcgacagatacgaattagcacgcatagcaaacaccgaagctatgatgtttactggtaacgatgacaccgtgaccaagctagcaacgccaactggtggcatgaatgtcttacttgattacttgtggcaagacctttcaacagcgtcaaacatccctaaatcggttttgacgggtgaacagtctggcacgctggcaggcgcagggcaagacgtgcaaaactattatgacagtgtgaaagccttacaagagcagattttgaagcccgaaatcatgaatattgtccgcttgttgatgtattcgaaagaatttggcggttacttagacccagacagcttagaatggcacattgagtttaatccgctatggacaccggacgacaagacgcaaagtgagacactggtcaaccatgcaaatgcggccggaacactggtcacaaacggtatttttgcccctgatgaagtccgcaacatgttcaacgggcaaggcaacaacgcaattcaagggatgcagaacaacgcaaacgtgactgacagcgccgacaatatcgaagctcgatatacgcaagagcaaattgaccagtactacaaagacttagaaaaggcgcatcccgatggctaggcgacgaaatgggtatccattaaaaattgaacggtcgtactatcgggatatgtctaaactcattcgagagtggcaaaaaatcgccctcagagcggttgacgtgcatttacggcattatcttattaacggcactaaaatgctcacagatgcggataattcacgtcaaccagattggacaaattacgtacagcaaaccttaaatttgatgtcggtcaatatggaaaatcccgtcactgaccagattctgcatgatatgacaatgcgttttgtctatgcagtaagccagtttagcgctaataagacgcgtacacatcaagtagcaattcaggctaagatgggaccatatgcgcttaatccgctaagagataacgcaaaattgcgtgagtacacatggggcaagattctggaaaacacccaattaatcaaaaccatgcaagggcgctatatcgatcagttgaaaggcgacatttaccgaactatcaatgatggcggcggtcttactgatatcacacatgctatcagcaaccgtacagggatgactttgcgacatgctgacttaatagcaaccgaccagacaggcaagatactagctcagattgacgcatatagaaaccaacaagcaggctcaacgcgatatatttggcgctcaatggaggacaaacgggtaagaccgaagcacagggaattagacggcaaagaatttaagtatggtgaccccaacggcggggacaatggtcaactacctggtgaaccgataaggtgcaggtgttacgctgacccaattgactaaaattaaatgaaacacaaacgcttcctcaatgcgagggagcgctttttttatgcccaaaattagcaaactttgtgaatttttttggtattccgcccgtgggtgaatctcatttaagcccgttaaatcaacattcttactttgtgaaatttcaggaggattttatggcagattcaaacgaaattaaaccagttttaaccaatttaaccaatgcagaaactaagcaagcaattaatgctttgaagcctaaaagcgtggaggtagctccaaaggtagaaaagccaattgaagttgtcaaaccaacaccagtagcaaaggaggtgaagccaatggcagaagtaaaagaccctagagggatgttcgattatacaggctgcgaacagtacaccgtgcaagatggcgaaacattgtttgatgttgctcaaaagtacaaggtcgctttgcaacagttgcgttatttcaaccatgtaccaaaggacaccatgcgagttaagcctaggcaaacactgtacatccccaaagaaccggtattagtgccagtaggcgaatagcatgaacctgacacggtacgatacagcgacgattaacaagttttctgttgattcacaaacaggattcttgcatgtaagcaatgcgccaatcgcacgtgtgggcgtttttccttatatcggtaaaagtgggcagatcaccatggaagccaaacttcctgatgatttattgactgattcggctgttgagagtgcaaattcaaagccagttacagacgatcacccacaagaatcggtgaacgtgaccaatgcgaaccgatatatgaagggattaaccgccaataatgcccatgttgatggtgacaagctgaaagttgacatgactatcaccgattcggcattaatcaaagaaattcagggcggcaagcaagagctttcaattggatttcaaactgatgtggtacccgttaaaggtactttcaagggtatggcgtacgattcggcacaaaagaacattcaaattaatcacgtcgcagtagttaaacgtggtcgtgctggtcattcggtgagattaaccggtgacagtgcagaaatggttatagatgattcacaagagaaaggaacatcaatggaaactacaaaaattcgtttagatggtgcagatgtcacagtcgcaaccacagacgcagaaagaattttaaagcttgatgctgacaacaaggctaataactcaaaaattgccaaacttgacgctcaaattaaggctttgacagccgaacgcgacaagttaaagggtggtgctgatgctaacaagaaatcacttgatgaagcacaagccaaggctgattctcttgaaaaggaattagccgcagaaaagaaaaagtttgaaggggatgcactagatcaagcaatcgctgaccgtatggcacttatcgatgaagtaaagccatatgttggcgattcttttgattttaaaggcaaatctccgaaagaaatgaagctagaagctatcagcaagactgattcagtcgatttaagcgctaagtcagatgactatattgacgcttattttgactcaatcaagaaccgcaataactctggcgtagttggttacacgggtattgaaaccaatgtcaagacagacagcgtagacaataaacccgcaaaagaccgctaccacttagcctaaggaggtaattaaatggcaattccagatggagaactttacaacaccggtgaacttgcaccaggtcaattagcaaccattgaacgcgcaacaatcaacaccgaacaagcaggagcaccaatcggcttcggtcaaggtgtcgcaattaaagatggtttggtagttccagcaaccggcggaaatatttttggcgtggctttacgcagaacttacttaaacgctgactacttaacacaagaaaacattgatgctgacaagtggcaaaccggtgaattatttggcgtagttcgtgagggaactattcaagtaccaattaatgaagatgtaaatgaaaacgagaatgcagccgttgataaggacggcaatttcaagccagcaggcgctaacgacacagtcgttggcgtctttttaggttccggcaataaaggcggtaccgcacgcatgcaaacccgtatccagctttctaacacttctgttacaggctcaggtttgcaaaatgctaacgcgccacaagttgaccaacctagcacaccagcagttaaccaaaagccagcatccctatcaacgggttcaacaactggcacagacaacaagaacggaggtaaataatggcgaataaggactatttaacgcgtgaacagcttacctatgttgacaacgttattaagaccccaaaggaacaagaattaacagctatgtctcttttccatacttttagcgttccagcatggactaagcaaaccacatacaaggtaatgactaccgccggtcaagccgcacattacgttgacggtgccgacgatattccagtagttgacatgaatgtaaccgaatcagcatccaacttgaccgatattgcgattgcggttagatactcacgtcaacaacttggtgaagctcaacaagtaggcatggacatcttaacgccaatggcaacaagagcccgtagagcgctagcagaagccgaaaacaagcttatttttaatgggcttcataattcaaacccagcacttaacattaatggcttgactgacccagtttctaagttgggcgtgcaagaatcaaccgcaccggttacatttgatgcacttgctgacgacccagacaacaacttaaagattagaaattggcttaaagacgcccaaagcaagattacacacttagctggctattcaaacgctcaaccaattttagcgttgccacaaagcgcaattgaccagcttgatatgccttacaaccaatacaatccacaaatgactgtattgcaaatgattagaccatggttcaaggacattaaggcggttcctgaacttgaacaccaaaactttgggtctaacggcaacaagcaagatatgggttatatcttcttgaatgacgcggacattgtacaaattccagtggctcaacaaatacaacaattgcaacaagaataccactcaggacgtaccacaattccttacactgaacgtcttggtggtcttgtaatgtactacccacacgcatttgtacaattgcacggtatcaacgatccaaagaaagcctagttcggaggtagcctatggacgatttacaagacatgcttaatgctgtgaagcaattaagcccagatttaacttctaaactgtctgatgatgcactaaatgggctattgactaatgcttatcaaatagcaatggctgatggttttccaaagcttgccaagaacaacgatggtgagactatcaaagctcgtgacatggctacgcaatacttagccttgcatttaatcacgattaacaaggctatgggcgatggtggggctaatgtcaccagcgaacaagtttcagtgttgaaacgtacttatgctgacgttagcaagttagagctattccagcgctcgccatgggggcagctatatctatggctgtataacctttacggcaacggtagtatttcaagatatggggttgtgcaacactgatggctgatagttttgaagaaatcgaaaataggctagatcatatcacgaaagaaatggactacttaaatcatcaccaagtagtaattggcttttttagtgatgaaaatagcttgcttttaacaatcgtgagagccaacgaatatggggcgcatatccgtcctaaaaattcgagtggcttcttatggattccgtcaaggcaagctattaaagagttcgggaaaaacgttactgcaaaagacgttagaaataagtatcagctgttcatccctaagggaaagcacattgcggctgtcaatcaagacggcaaattggtcacatatttctatctgatgcaaaaagtagacattccagcccgtgcctttatcagaaaaaccggcatagattaccgtcaaaaataccgccgatatatcaaggcaggtattgaaggcattatgtatgatggcaaaactggtaaagccttgcttgaaaagctaggacgcatgggcgtgagggatatgaaagaagtaatgagacgttggacaaagccaggtaatgcgccgctgaccattgacaacaagcgtggggctaataatcccttggttgacactggacaacttcgaaagcgtattacttggaaaattttgccaatgacagggggcacgctatgagtttctatattccgtttgcggatatgctggacagtttcggggttgatttaacagtttccccatataacagcccagcgaaaaaggctcactttcactacgtgggtggtgtaagagttgaagacgatgacgcgccagatgtgcaaccggaacagcgacatgaaccggttgttccaaacaatgcgcaaaattctttcatggctcaattttatacgggtggtgagatggcgcaggcagatcttttatggatcagctctaagctttatcccacgaactcgaccgtagaagtgccgtctcagccaggtcaaaagtaccgaattacgggcagttccaactttcaaggctattccgatgttgtcatttatgcactaaagggagatggcaagcaccctaatggatagcaatttaccggtattgagtgatcatttcttagtgcaatatattctgggaaagctggtcaatcaggtcacgggatgcgagttggtcgaagatgcaaacattgacgaaatggaggattatccgtttttcactttcaaatggattgacttggaccaagagcctaacgccgactggctaggcaagcatagacagtatatctgcactatgcagattgattgtcactcaaattcgagcgtacaagctatgaatcttgctagaaagctttttgaagcactccacgaagtgccatatcgcaggtttttcaagcaagcgtacatagtgcctcagagcattgataacacgggcgatagaaccacttcacagggcattaattatgatcacgattttggttttgattgctctttcaccgttactggtggctttgagtttttagaaaaagacctcaactttaatgtcgaggattacacaattgaatcaattaaaggcacatcaagcgttgtcggcagtgataccgacggcgcttttaatgtgtccaaaaataaggaggaaatttaatggcagatgctaagacaaccactgtcgttgcaccttatgaccgtgtcagcgacgtaaacgtggttatttcagttttacacccacgtccagtagttgggctgggtaatcttttaatcctaaatgctgtcactgcaaaggctccaacgccagcgcaatcagatggcaaagacggtaagagcaccgatgctaacgcacaaactacgccagcaactaccttgccagatcaattaagcgtacaagaccgcatgaacggaattctattacgcaagactgacaaggcaactggcgcaatttaccgcgaatacaagaacattgacgcggttgcggttgattacggtgaagacaccgcagtttataagaaggcacaaacctactttgcacaatctaaccactccgaccgtgtggcagttttggactatgacccatcaaaggcatacgacgctttgaaggctttctggtactttaactggacctttgcagttcgcacatctaatgacgttgacgacaacttagttgctttatcaaacatctttgaagctaacaagaaccatatcttagtagttcaaagcaacgatgtaactcaattcgacaagatttacggtcaaaactacaccgtcggtttgaagcatgacaccgctgaaaacatggacagtgctcttgtgggtgcaattgctaccttgaccgttggttctgtgacctggaagttcaagcaattaaagggtgtaacacccgaggtattgacctcaaatgaattgtccgcaattcacagagctcacgcattcgcatacgtggaagttagcggcgttggtgaaacgtcagaaggctggactatgtctggtgaatacattgacgttattcacggcattatctgggtcaacaccaacatggaaaacaagttagagcaattcttgcaagaaaatggcaaggtctcatatgaccaagttggaattactcgaatcaatggtgttgctacgcaagttatggagcaagcatacgcccaaggaatcatcttaaccgatgaaaccactggtaagggtgattacaccgtaactacttcaccacgtagcgaacaatcacaacaagacttgtctgaccggcattacggtggtttgagtttcacttaccacgtatcaggtgcaattcacaccattaccgtacacggtgaagttcaatcagacacgattttaaactagaaaggacttattagatggcagctcataacaacgcacaaacggggttgatgggcacctacgacgccaataatgtttacttcactattgacggtaagactgcttatggctatggtgcaacaacccttttcactttttcatacgataacgatttgttatcagttcaacaagaccctcaaggaacaggtaccgcaagtattaacaacaaaactggcggtacctttactttaaccatcaatcaaatgtcaccattcaacaagatcattgacgacttagccgatgaacgccgtgttggtggttatgcggttgatgcttgcgatggctcacgtcactatgtgggcgcgcatgcttatatccaaaagaagcctgacggtggtgccgctaatgaagccggtgaaagaactatcactgttaaggtcttaaacgttgtagaaaattcagttctttaattaaagcgaggtaaaaatttatggacaacactactaacactgaaaaccaaaacttagaaactactgtaaatgttgacgcacaagcaacagaagcaccaaaggcagaagataagccaactagcatggctgatattttagctgctagaaacaagcaacttcaaaccagtgcagttcctaaccaacgcggtatcactaaggacatcactcttaacgctggaactccacaagaatacactttgacgcttcaatacccaggttttgccattgcttcaatgattgaagatgattcaacccgtgacggcgatattaagttatcactcgtattaagcaacgccgttgataatgatgtatttgttcaaccacgtattaagagccttgatttctgggacactcacaagggtggggtagatgttgcccgtgaagtgctttcctttcttaacgacggaatcgacggcaacctggaataaggaacatctaaaagaagcggctgaccgttgggaagacccgattaggttggctatgcacggtattccgctggatttaaccatgaaagcgaacagaaaccagttaaatatgtactgggagatcgtgcgaagagaagaaaaacaacgctttaacatgcaagcaagcgccactgggctaggtgtctggggcgatggaaagaaatagtgaggtgaagtcaatcagaaaataaactgatggctttttattttgccaaaaagaaagggcgttaataaatggctgatgcacatgaaggcatgtcgctgtccttaaaagctaattttacgcaagtgaatgaggctaaaaaggctacacaggctttaaactcagcgttcggggaattgcagagacgagcaaacagtttgcacatgtctgctaatttcccaagggaaataaaccacattgacacggtaaccgcgtcatatgttaaacgtctggaatctgagggcaaaacttacgaggctaatcaacaaaaggtcaatgcatatcagggcgcgatcggcaaattaagcgccgagcagagccgcttacaaactgccttgaaccgcaccactagttctactgacaaggctagtgatgcttatagaagtcagcaaataaagctcaatcaaaccacagccgagataaacaaattcaaggctgggattaagtccgctcaatctgagatgaaacgaatccatccaaccgggtttaaccgctgggtaaagggtgctaatgaagtaaataaaatcacagatactgtaaaaggtaaattacatagtgcttttagcagtattaaaggtggtgcaattgcatccgctggcgcaattggtgccgttggtgcggctgccttttctggcgctaagcaatcagcggcaattcagcaaaggtaccgcgaaattaacaaccttgctgttcttggcggtgaaaagcaaaaagaagtaactaagtcggttactgaaatgcaacgtcaagggcgcgacatgtccattaaatatggtaagtcacagcaagaaatcgcggcggggtatgaagacttaatcaagcgtggttatacaaccaagcaggcattaggcgcattacaagccgaattacaagctagtgttgcttctggtgacgacttcaaagacgtaaccacagtttcatcacaagtgcttgaagctttcggaatgaaagcagatagtactaaaacaatgcttaaaaacactaaggaagttgttaatgaattagcctactcagctgatgcaacttctacccgtttcagtgatttaggcgttgcgatgtcgtatgttggtgaagcggcacatacaaacagcattagtctttctgagacggcatcggcattaggtgtactgtccaaccatggtatggagtcggacaaggctggtaccaatttacgtggtactattaacggcttaacaaaccagattaataagattggcaaaaagaactcaatttttacccaacttggtattactaaatctgaaatgttagatgcacatggcaatatcaagagtttatctcatgatatgggtgttctgtacaaacatgttcaagagcatagtaagggcggctcgcaaactaacggcttctttaggtctatttttggtactactgcgatgaacggtgctttgacactggctaagtatagtagtgaagtatcaaaattagataaaaacactcaacattacggtaagacaggcacttacgttgctcaattggccaaaaagaatatggctactgcgcagggcaacatggcaagtgctaaaagatcactagatgtctttaagatgaccttgggtaatgcgttattgcctgcacttaaccaggcaagtaacgcacttgctaagttcttgttgtcgaaagacggtaagaaattccagaaagatgttggtggcgctgttggctatgtggctaacaagttggtggcatttatcaaatggacatcaactcatgaaaaagaagttgaatggattggtaaaggcttattagtcggctattcagctgttaaagccgctcaatttattagctttttgggtaaagtcaaggattggcttgaagccattaaatcaattaaatttgttggtggattgtttggcaaagggctggaagataaagccgccactgccacagttcaaagacttggtggtgcagtaaccaaaggggctacacgaggtaatgctggcatcttaacaggtgctttgcaatcggctaaatcagctggcggttttaaaaacttaactactgttggcaaaatagccaatgtaggtgctggtatcggtgttggtattgatgctggtacgcaagttttcagcgctatcaagaaccgtcataatgcggaaaaacgtagtcaagacattggtggtgccgttggtactggtgccggtggcttgatcgggttagctgttggcggtccaatgggtgccgctttcggtgctcaaattgggaaagtcgctggtcgctggggtggtcatgctgtaaaccagttcactaagggctggcaaaagagcaagccacctaaaagtttctggtcacttgaaaatcttggttggtcaactcacgatatgttcaacgaggtcggcaaaggctggaacaaaggcgtcaagggcgttggtaagtggattcatgatatcccttctaacatcggtaagactgggactagcataaaaaactgggctggcaatgttggaaacaacatccacaaaggttttgatactgccacaaggaatactcacaatttctttaagagtttacctaaaaatactcgtaaaactggaagcaacataaagaattgggcttcaaaaactggtataaatatcggcaaaggcattaatagcggttggaaaaaagctaaaacaggtgtctccaattttggcaaatggtatggcaaaaaatggaatgacatttggaaatcagttaacaacaaccgctatgtaaaggcatttaagaaaggtcaacttttccaaactgcctttaaggacatgaagtcccgttggaatgcgttctctaaatggtttggcaagggctggaatggcttttgggctaagataggcaaatgggctaagaactcatggaacggcattaagcgaaactggaataatttctggggaagcttgccccaaaagtgggaagcattcaaaaaaggctttgccaaaggctggtctaatttctggggcggcataaaaaaggcttgggacaattctattggtggaattatcaaagcctggaatggcttcactggcaaacttggtgcttttggtaaatgggcgaaaaactcatggacgggtaccaagaacaatgtcaaaggctttactaaccgaatgatctatggtgctggtggtaaaaagactactttcaaatacgacaagttcgcacacgctaacggcggtacaatgcatacctcacacggtgctcttgtcggggaagccggtcccgaattagcttacaagccttacgctaacgacgttcgcttgcttggtgctaatggtccacaatttacaaaggttcatgctggcgaacatatcctgaacgcacgcgataccgcaaaggtattaaacggcggtttaggcaatgggctaacactcaaaggctacgcaagcggaactgataagcttggtaaaacctcaaagaaggtaaccaacgactataagcaaattgcggacaaatcgtccaagtcacttaatagcctttctaagaagagttcaagcacttggaataagattacacgtcaaacgggtaaagacagctctaagacccgaaaacgggctatctctgactactcagacatgcacaaaggcatcgttaagcagatggacaagacccatgacggtgttatcagtcttagtgaatccactgccaaaggctttggaaaagcattagacaagaccaagggttacgcacgggatgcaatgagtgactcaattggtgagattaacaagggtattactggaattgacaaggttcttggacaattcggaggtaatacctcagttatcaagccagtcaagttcgcttctggtactgacgcaaacgggcgtctaaccgaaaacacccttgctatggtcaacgatgcacaaacaggaccaagacaagaagccttagttagtgacaagaatgaattgttcttgccacgtggcaacaatgtcaccatgatgctaccaaagggctggggtgtcctcaacgggacacagacacagcaggtggcaaaatcagccggtgtaaagcattttgccaaaggatcagggctaagccatagcgcattgagaaagcttgctgagaaggcaggagccaacccagcacaaagcttcaaagaaatgtacttagacaagctcaaaccaagcggatcgaatttaaagcgtggttctatcggacttgtgcaaaattcatctcaacacttcggtaatccatggtctaacgcgatgtggacggtcatcaacaacgcaatcggcggtggtgatggtaaaggtggcactcgtgaagcattcctgagatttgctgagtctacattctctggcgtcccatatgtcatgggtgctatgagtaaggcggctagtgactgttctggtatggtcgcacaagctttaaagcatttcggaattaatgctgggcgttcaactgttgatatgcaacatagttccgccctccaatatcttggtaaaagcattaatcgaactattccgggtgacttggttattttcggtcatgggacaggcgcagccggtcacgtgggtatcgtcaagaatccaagaaccgggacaatgttcaatgaaacaccgccaaaagcgcgtgtcacacgaattgctgatgacatgggtatgggctatggtttctaccgtgtcaaagggttacacaatgcatcaactgctaagaagactgcaaagccagctactaacttaactgcactagcaaaacgcgaacttggtccagccgctttaaagtggattaaggacaagttaggcgatgaaggttcactcggtggcaacatcggtggtgaaggcgtcaagcgttgggctggtacagttaaacgagttcttggtatgttgcacttgtctacttctgattcaatggtcgcaagagtattgcgtcagatccaaactgagtcaggtggtaatcctaacgcaagacaaccagggagtgacccagacggtgacggttctggtccagcattaggacttatgcaaactaagcgagcaacattcgaagcctttaagcgtaaaggctctggcggtatctttaacggacctgccaacatttacgctggcttgaattatgctaagcaccgctatggttctagcttgtcagcattaggcaatggtcacggttacgcaaagggtggacgtccaaaagcacacactccatttattgcaggtgaacgtggtccagagctaatcactgctgacggtcctgttaaagttgatagtcacgaacaaacaaagcgtaaagtttctgacttagcgcaaatgtttaagtttccaaagattaacagacctacacggtcacacagctcagcgccggtcattaacatcaacctcaacggtcctatctacgggacaagggaggatgctaagcggattgcggaactggtacgccgtgaaattaataaggttctagtaaacataagcgatgaattaggtacggatccatcgctttattagtaaggagttgtttttatttggctaaaaaagaaaagccaaaaaacaagtctaagccccgtaaggggcgcaaaaagactaaggcgcaaattaaagcagaaagaaaaataaaagaaatcaaagataaggctgataaagctcaccgtgcggcaatgaaagccaatgcgacggcaatgaacttttcagcaaaagtctttaacacgaaagatccaaagctgaaagctaaatatactaagaagtttgaagaatacatgaaaaaatatcatgcagacatgaaccgatacaaaaagtatagaaatcagcttaaaccagctaagaccagcaaaaagcgtgttaataaaagcaagaccacggatcaagccgcgatggtcagcaaaattgaacaacataaaaaagaatttacgaatgaaggcaatatggctatttttcctacactcaacgggacagaaagcgatattgtcttttttagccccacaaatacggaatcagaaagcaattcatcaaacattacttcttatgccgttgatcagggggcacctcgtaaagattacgcaagattcaattctaagacggtcactattgacggtcttatttctgacgacattaacggcggtcgcacagcccatgataaatgggtgcagttaagaacgtggcacagtcaccatgaagaattaacgttccgtggtgacatttattacaagcacttgctgatatcacaacttgaccggcaatttaccggtttcaaaaacacgatgcaggtttcaataacttttacatttgttcgagctgctgagatcacgacaagcggcaaaaagaagaatgctaagcggtcgaagtcttctaagacgttggcaggcaacagaaacaagaactacaccgcaataaccatcaagccgggcgataccctgtggggattgtccaaacgctatggtaagtcggtttcttggcttcaaaaggtcaacaagatcaagaatcctaaccggatttatgccggcaacttgatttatgtcaacgataagaagcataaggctaaaagcaagatgcgagttaagtaaggaggggtgaaatgcgtcaatatattccagtgaacattgatgatttgccggacattttcgacatcgaattggctggcgaggtttacacgctaagaattgactataaccccgttgctgactggtataccatcactatttatcagaatggcgaaaccttgctagaacaggagccgcttatacttaatcagctagtcgctattgatattcctgatactcgtttacctcgaattgatatgagagtgatggacgaaactggtaacgcaaaagatgccggcaaggctgagtttggctatgatgttcaaatttacattgatgtgattgatccacttggttcagaagacgaagacccgactatcaaaccactggggtatgaccctgacgaagatagcgacgatttaacggatcaggaggtctcatattgatagttactagcaacccacacatgtggtttgtctgcactaacgataaaggcaaaacccaaaccgtttacaacaacgagcattataagcataattatccgtttacgtttgaagttaactttgctgattcgtctacgccacagcaaaatacggtcactttgtacaacatgaccaaggagcatgcaaatttttatcataagaaattctattgctatgttgcgtttaactggggaccagataagaagattcttgctgagggatttatcgaaaaaatcggcattcctaaccacgatggtacaactgatacctttacaattactttcactgagggcacgaattacagcaatgtagccgctcgcaaattgaaagtaacaaaagaaaagaaggtcaacaaatatgtaacgaagtgggtcaagcaacctgataagacggttactagataccaccattacacagagaccaaagagtacaaacgaggtcctaaaaaaggacagaagtacacggttcgccatcgaacgccatataaagaaaccattaaaggtaagtggcgtaagaaacggattaaaacccgtgctacaaaagtagtcaaagttaataagacgtttcgcaaaggcacggactataagactttgattaaaggaattgcaagtcaatcaggaatcgtaatttctaagattgacttagcaaagaatccaactttgaaaaagtcatttaccgcaaagggcaaaccattaacactgcttaaacaggtggtcaaaaaaacaggttcaatcatgacctacattcaaggaaagcttgaaatcattaatccaaaaagcacaaagagaacgtggtatgagattgatggccaagacctgttacagccaccaagttacaacgaaagtagcgatgacagctccggtaaaggaacgtgggaaatcatggttccattggttccagacataaccaccaacgtggggattcacatggaaagtaagtatttgaaaggctatttttatgtgaaagccggtcaacatacatttgacatggataaagcacaaacgcaatgttcacttggaaagatttaaggaggtgagtgttatggcacaatcacaaaatgaagaacgtaaggcggctatcaacgcaatgcgcaaatttcaatggggcattatttctggaatggaaaatgcattaattgcaaaagttattgactataacaagaaagatcatacggcggatattttaccgcttgctaattcaagcgacggcgaaacatcagcacaatatctggatattccggttactgaaaattgttacatgttggatgaaatgattgagcgacttaaaccagaatttaaaagaattgattctgaaacgggttcgcatttggttgataagctgcctaaaaagaagcttatgagaaagggcgtcccagtagttgcggtggtattagaccgtgataatgacaactgggaaggtggtagagctgtcaacacttacactccgaatagttcaagggttcatgatgctaatgatgcgattattgttggagttctcggaggtgatgcgaaaaatggctaaggatttattagttaatgagtacggtgatttagttattgaccctactactcacgacttagcaatcgttgaaggaattgacgaaatagcccaaagaataagggctacactgttaattcgctacggtgaaatgcctaatcttgacccagatcaaggcgcagattacagcaatttcattggtaagaattttaacgctcagcttgcatccgctgacatgtctacgaccatcacagaaaaggttccagaggtcaaaacggttaatagtatcacttttaagaaaatgcctagaagaggcttatatgtggcttttagcgcaactgttcaagttggcgatggtcaaccgaaaaacgtagagggaggttttgaacttggcgatagctagtttcggactacacaagcgggggttcttagctcccacatatgaagaaatactggacagtgtagaagatgacttgatgcaacgttttggcaccgatatcgtcctgacaagtaattccaattttggaattattgcccgactgatagcgtggcgcgaaaccttgctaattcaagaactgcaaaaaacttactattctgcttatatcagcacggctactgaaagctcacttgatcggattggtgctaacctagatcttccaaggaaagttgctacaccaagctttgcaaacattcaaatcgtgactgatgacgaatatttgatacaagcaggtgaacagtttgaaaccgatgacggtgttgtgtttgaccttatcaaggacgtaactaccgcaaaagattcaaatggtcagtacattggagtaggagttgtccaatccgttgaaactggtgactttaacaacgttttgcctaacacaatcactattgtttctaatccggacgaagacattattagtgtgacgaatccgcagaaggcagctggcggacaagatgatgaagacgactccacatatagagcgcggctaatcatggaaaacgtggcaaagcctggaccgtcaacagctggtatcaaatcagcattaatgaatttaccaggagtaagacaagtaaacattattgaaaatccgttcgcagacgcggaccaatacggaaatccaccgtattcggttcacgttttttgtttgggcggaaaagaagacgatatagcgagttgcttagcagataaagtagcggctggtatcagtcttactggtagcaaagaagttcaagcaaaagatgcaacaggtgaggttaaaaagatcaattttgattacgcaaccgacaaaccaatttatgcaagggtcaaaattcggacaactgacgaatggaacgccgacgacggtgctgactatgtaaagcaagaaatagctgattacatcaacagtttactgatggacggtaccgtttacctaaccaaaatttatccgtctatctattcaattgagggcgttggtgaggcactcgttgagatcggaactgaccccgaacatttagcagataaagatatacatacacagccgtttgaagccgtctcttgtgacactagaaatattgaggtggtcgtaaatggcatatgagacttctgaacagcttttagctgagatttcagactactggtataagcgacctggtggcaatctttataagctaattgatgcctttaacgagccactagaagggattagtacaaatgcaaataaggtcgagcgctggcgtgctttaaaagacgcccaaggaacaacgctcgacctttttggtgccgacatccagacatatagaccaagtcaagacgacgacaattatcgcttcattattcacgttatggagcttctttcacgggcacagggtactgtaccctcaatcgtgaaaataacgtctagtgcgcttgaatatgaccacggtttcaaaatctggaagacaggtattcgtcacgtagggatgcagataccgtttgatgcggttcaaaacccgcaaatggaaaagtttatgcttaacaacttgcaaaaaatgctggcgatgggttactggcttgacttgataatctttaaagctactacacacgttcacggctatctaggtgccaccacgcaagatagggaccatgacatcaaaacatttgcgtctatctggtgggaaggctacaaagctaccacgtataaccattggtattttgggacagacattaacgagttgcaaaacactacacatgaagaagtggctacttggtgggaaggttggaaagcacaagcaaagcgcatgtcgtacatcggtaccaagcttttaacacatgaatatcaagccttaaaggcaatctaatgaaagaaggtcaaaatggacaaattcaaagacaccattatcaccgatgcagggcgtaaattactcattaatgtcggcgctggtaatggcgaaattgcatatacacgggcggtgctagctggtcaagatgtcagctctatggctgatgaagacattcgaaagcttgccacccttgaaaatcaaaaaatggaggtcaacgtaattgttacacctccacaagacaacacaatcaccgtttcggcttcatttggcaacaaggacttaacggatgacttaacgtttagctcagtcggttggtacgctaaaaacaacaacgataacaaagaaatcttgcttggtgtatcaccgtcaaacggagaacaaacactagcggcaggttcgccagatcaccggtcaacggcttcaattgacattgatttagcaatggctatcagcaatgccgcaaaagttgacttgacggttaacgagattggcgtagctcacatgagcgatgtcaacgcggctattttgaagctcaaagcggagtatgacccgaaaattgagcaagctggcaaggtcaaaggtgcaaagatcaacgacggggcggttgttgaacccgatgatgacggtattcttgacttgatcgttgatagtgaccgcattaaggattttccggcagatttaaaagacctcaatgacctgccaagcgggacatatcggacttcccaaagtgctgctagctttgtcaattaccctaaaatgcaagatggaactactccttttaatatcccaatagtctggaaaaacgcattaatcaaagtagtcaaggatgctaatgctggataccagcttatagtgtccagccaacaaaaatatgcaatccgctattttagtaataatcattggggatattggtttcagcttccgacattatctaataatgacatcatcaaattaattgactccaaggttgacggactaaacatcggcaattacgccactaagacggacttaactagtgtttctaactcagcagtcaaaaaggttaatggcttaacccctgacggaagcggcaacgtaaacgttacctcaaccgttgcccgcggctttgatgctaacgcaaacgctacaactaagatgacggaagaaaacctgcacggcggcaatcagatcttgatggatcagaatgcaggtcaagacatcgttaactgggcaaaaggtcaatttaacacactgaacgggaatatcaataagctcaacgctaaaactgaaattcccggtgttgccaatgcaaatgatttagttggtgacgcttcttcaatcagtacttacaaattaagtaactctggcaatcttaatgtgccggatttctacccagataagcgtggcacgctaatcaacattaattatgatggaaacgctaaaactcaaatttggattccagtaggtaattcaggtggcgactcaattgctttgaggtactgggaaggcaataactatcctaaatggaaaaaacttgcaaccgttcaggatacaaccaacttgcaaaaccagatcaacgacttgaaaaagtcaaatgctgatttgatcggcactgttaactggttgaaggataatgccgcaattgctagaagattcccagctagtcaagaagcgcaagctcaacaatgggaaaatgatcatccaaactactttgcattgatcgaaaaaatagatagaaagaaggtgaaagcatgctagaccacatgatctttgacagactgaaatggttcaacatcagtgacaatactgatagcgtgaccgcaaacggcaagaattggaaagctattcctaaacaagtagtcttgccacaaggggcaaaaatcgcaactttttctggtgatggttctgctcttgcaaccgatgccataattatgctaaattctgacactactgcgaatgtcattggtaaaattgcggactgttacgcagttactggtgtttttaatggaacgggtcaaaacacagaaaataacgctacattaaacttgagctttgatgaagaatacatttttgacgatcatagatatgaagttaattttgtgtcattcggtcttattcgtgaatcagaggttaaaagtataaactgggggggaaaaaaaccttctacatactgttgtatcagtggttaagcgtgctttcactctatttaagaaaggagcggaaacatgctagatcacatgatttttaacaaattaaaatggtgggactccacgaaccgcctactgatcggtaaaagaatcactgcgtcgcttgatacttaccacacagttaaagctggatttaactttactgctgcggattatggcaatgtgccggctaaaaccaaagtagaaaatgccttaattgtagcggcttataaatttaatggctcggctggtaacgcaccaagtggcacgtatattttgactgatcaggacaacgccaagtggctaagacttgacggaaccgaaaacattttcggggggtaattagtcccctaagtcaagcatttagagctatcactagaaaggtggtggttctatgatcgaaagcatactctttaatagtgaaaagtaccgtaaatacggctacaccagcattactaagacactaaataatcctgatcatcgattcaagttagttgatagcgttgatgttttagatatgaacagatacactgtggtgacttttagcaatggcgatagttaccgggctaagaactacgttctatataatcatgtagacgagccatcaacgttttttaatccaacaacgcaaggcaattatttgcaagtgggcagcgaaaccacagcttatggaacaggtcccggcatagaagcttattaccatggagcttatgaagatgatgatcacggtatgcatgaaactccaataacggttgattgggtaaaaatagaaataaacgtagattagcactcaatgagtgccttttttatgcaaaaaaccttgctcacggggcgttcccgtgggctttttatatagaaaggagccaataaaatggctgacgaaaatacacaagttgcaccagtagcgggcgcagaaacaaacgctacacaagatcaaaacagcgttgctgaacaagaacaggcattaaaggcaaagttcccaactcttacaggctttgtctacttgtcagatcctgacaatgcggatcccgtttggcatcacaaagtaatcccagtttttggcgatgaagcaaatgtggggctaccatggcaagtccatgctgaaagaccagctgacaacttaaaagacccagtttggacagttggcgctactgattggagtgaaaacgataagaacaaccaacgcattatcttgcaacaagctacacaaaagctggctgaattggacaagaagagcgtagaacttgaccaagctaacgacaaggtagaccaagcattgaaggatatgcaagaagttcaagctcaatcatctaggcaaaacttagctttgatgaagagctttactgaacaaactcaaaacactaatcaaattcttggtgctatgcaaaagaccttagcaatggtaaccaaggcagttggcgcaaatgctaataacgctacaccagctaacccaacaactgatactaagccagcagaccaagcaaccaataagcaatagttaaggaggacataaatcatgactttaatggaacaaattcaagcaaactttttagagatgtatcgtatggactgggaattcggcatctatgacaagaacggtatgaaggacctagtagtacaaggtttcttatcagctgaaaattaccaaaagattgtaggcgaagcttatgcgccaactactgcaacgcctcaacaataactcactttacgtgatcattagtctgctgattttcggtaaaggtttgggcttttaccttaaccgcagatttttcttttatccaccacaactagcgtggatgatgaacaacgtttacttagattgttcaatgatgattgtaggcattgcgttgctggtttacacctgttcacggtacaacaacaataagcttctaggggtgttgttggcacttgtcgtggtgctgctagcaataatttcatcaatcgaaattgaacacgtgatttttgcccatgaaatggagtttgtccagaacgctttgtcaaatacggcggttatagcctttattatctggacagcaaggcattattcaaagcgttaggggtgatatagtgcatgtcgacctaaacagcattatatcggctttgtccgctttgcttttaggctactttacctttaagcaaaacggtaagaaaagtgatatggatagcgtggagaataaccgagattacattgttgaacagaataagcgtttaaacgcggaaaacaaaaaactactcaatgaaaatgaaaaactcagaaaggagttaagtgaaaatgaagccaaacactagaattttagattacgttaccttggtacaagacggcgttttgaccgttgacgatgcaccacaagacatcaaggcagaggttactaagtgggttcgctactttgcaggaattaaggatgattcaatggttaaggatcctgaaagcactacaccagcaccacaagtagaaaataagccagatactacttcttttttaactaagaaggtgactgactaatgaatttaagccaacttaatgaatatctttttgtgggatttcttgcctttgtcgctgtatgtcaaggtgtttctactggtattgatttctttgcgtctaagtcaaagaagcctttaccaaaggaagttatgaccattgaccagattgccaagttcgtagtaagtgaagccgctacgctcgacatttcaggtgctgaaaagaaagctaaggcggttgaagctttgctgaaccaagcacaaaaggaaaacaagccccttaccgaatccgtagcaaagggagctgtccaacacgcctatgaccaaatgcaggctgattccgaaaaggctacacaagacaaggatgacaacgcccagccaattggctttgtaagtggtgatgattctgatgcaaaagattagatataagacttacaacgaatttgtttttgaatcttttggaaaatcgtttgaaaaccaaaagattgccaaaagaaaccaaatgaaaggcggtgaaaaagatgtcaaacttaaccgtatcaaaaagaagtttgggtgttgatgtcgccagctaccaatcagaaaatgtaagctacacaggtgctaagttcgcactggtcaagcttacgcagggtacaggttacctcaacccaaaggcaaaaggacagatcaagagctcacttgctcacgggcttttaactggcggctacttttatgctacacactctggctctgtattaaaagcacgggcagaagctaagtacgctgttgaaaaggcgaaggcctacggcatccctcttggttcgtatctttcggacgactgggagcagggcagtggcaacgacgtcaacggcgctgttggttcaaacactgatgctgtcatagcagctatgcaagtgatcaaagaagcaggatataagccgctagtatatgctggtgcttatgtattgcgtaaccgtctcaacacagctcgaattgtaaagtcattcggaacttgtttatgggtagcttcatataaagtcatgggtcgtcaagattccgctgactttaattacttcccatcaatggacggcgtagcaatctggcaatttaccgataattacaagggttacaacgttgacggcaatatctgcttgatcgatttaaaggcaaattcaggtagttctaagcctaaatcaacaaacaagaccggagaatcgctgtctctgcatcccgttgtaaagtggaatatcggtgctgtcgcagtagtatccaattcaaagggagcatacgtttacacaagctccaaactggacaagcgggaaagcgacaagctaaaaccgtgtggttccatgtggcaggtgttcggattggaaaacggtgccgtaaaagttggcaaaaatcagtttttcgatggtcgtgccgtttatgtgaaggctaaccctatcgcatataacgacagcaaacatgcagtagctaaggttgttttacctcatactcatgcgctagacgctccaaaggctgacgcaggcaaggtttacggcttggagcttaactcaaaagtcgagatccagggaagagtcggacgctttttaaagattaaagagctacacaaaggcaagcaggtatatgtgacgggcaaccgtgcgtatatcgtgctgtaaactttacaaagatagccataatgagctataatttatccgtaattttatccataataaaaaagaaaaggagttgtaaaagctccaaatgtcgtgcataaagccacctcggaggattgttcctctggggtggcttttttgcgttatattttaatttttattgcaaatgtagatacaaaagtatatactaaataaaaaggtttaattaagacttgtaaggagatttataacaatgtgcaatgtggaattgaaacaatggggcaattcactagccgtacgactgcctaaaactattttaagcaaagccggcatcaatgaattaccgaccaaatttgatgtaacagttaacaaaaataatgaaatcgttttgaaaaaacaaaaagagcctgaaagcttaaaagagcttttcaaaggctttgactataaaaaatattggagcgactgggaaaaagaaaatcctggcaagtccaaagaagaggactggggcggaccagttgggcgcgaagtcttttaatttagaagtccttattagaagggaggtgataatttgaacagcagaaaagacttccatcaaggtgatgttatcatgatgaactttgacccaaccaagggacatgaacaagcgggctatcgtccagcgcttgtcgtgtcaaacgatgatttcaatatgatgtgtggaggagtgatcaaagtggttgctattactactaacgaaaaagaatttccactacacgttgaaattccagaaggtttgccagttcacggcagggtagagctggatcatgaacgttcaattgattctcggtcgaaagccagagaatgtaagtatgtatgcagtgtaccgtctgaatttttagatgaaattctccgaaaacttgcattaacttataaaaaaagccactagggagtaacactagtggcaaattaaagcttatatactgtctatatggttagattcagtatataagcttttttggtgcttgtaaagtcgcctgattttatagatagctttaaggcggtccaaatcaaacgctaaaaaattggcgtgcagatcctgaaaagttaaaaaatagcatgggagagggtacacctactagctaagttgcatgatcttagactaagtgtataattttttacggtaagttgaataaataattaaaaaagcccaagtcctttgaatttggacttgagctcaaacaaaaagaccagtagtctgatgttaagaacaaaaaacacattagaagctggtcttttatgaattcaattgtaactgaaatcgcaaatattataaagtctgaagataattatattaagcgtgaaagaaaaataatctgtttcttcttaaacctgattaaggaaatcatggccttggctttagctaaagttgatgatgaaatgattaccaaggttaaagcacagggctatcagattgataagaagaatgagcgctcaatcaatatggcttttggcgaagttaggtatgtcagaagaagatatgtctgcccaggcaaacaagcaaggtatcccttggatgaattaatgggcttttacaaatacaagcgctacagtattttagcagtcaaaaacatcttagaagtaagcagcgttgccacttatcgcaatactgctctagcagtcaattgcctgtctggctttaatattagccatatgcaggtgggcaatttggtaaaaatggccgggaaaaatattaaagcgggccaagaagcagattcaagatatgatgccgcaggcactaagaaaaaggtcccagttttgtatcttgaaggcgatggcgtggtgatcaaaggcactaaaagccggttggaatttcatcgctatcaggtctgtgaaggcattgtcaatataagcaagaaacgcagaaagcgaatcaatgccaaggaatttgtttctttaagccgacttgatgcgctgaacgaagccaaggagtacctggccaatacttatgatctttctgatactgtaattcttagcaacgccgatggcggtgctggatatgccaaaacagacttcgatgacattgtagggctatgcaagcgtcatgagcatttcttggatgtctttcacctaaataagaaaatcaaagaaaggctatattttgcgcctgacctgcaaggcaagctgatttctgctttggaatacaaatacagctatgacaaagttaaaactatcctaaccactgcagaaagccgactaattgatgaattgaataccgagctcaatcatgattatctggggcgcctaaggaattatattgatcgtcattgggacgatattaagccgtttaagaaacgaaaactgactgtgactaaagccattggctgctgcgagagcaaccaccgcaagtatacctaccgtgttaaggggcaaggcaagaaatggtcaaaatctggagcagaaggcatgcttaggatcttaagctgcatcaagaatcgagagctggaattttggcttagcagcgagtttgaagattcagaaataactgtattgactgaacaggaattaaaagcagcggcccgtgacagcttaaagaagcgtcatgaagttcatttaggcatccagcatggcgcattaaccgcacaggtagctggcaatagttatttaagcaagctaagcagaaatttaagtcatataaatatttaagaaattaaggttagactaatggtttaaaggctaccgcaaaaacattgacacttacgatcttagaaaactgccaaaatgagaataaataatgtgctataataaatttgggttgcaatgcaggattttcaagtcgatcggcctagcaaaaaccgctcacagcttggctgtgggcggtttggtagttatcaaaaatctactgaaaatctactgaatacccagcagatttaatgtgatctgttgggacaaatcaaaacgaaaaggactataagttaacgtatgagacgtgatagtacaagaatttatattgacatcaacggtaaataaaaatggctaaaaataaaaaaaatagtgtaagtacaattttacttagagttgctgctatcatattattgcttgttggtattgctttgatatttaacaaacagatcagtgatcaattaattcatcataatcaacaatctactttaagtggaataaatagaaagacaattgaagaaaacaaaaagaaaaaaggaatgtatgattttagtaaagttaagtctttaggcattgcacaagcagcaagatcacaagtgaaaaagacttctggtgcgattggtgcgttagctattcccgatgttaatatgtatttaccgattatgttggggatgagtgatgatgcaatgtcgactggtggcggcacgatgcgagccgaccaagtaatgggtaagggaaattatcctcttgcaggtcactacatgacagcaaaaggtattcttttctcaccacttgaagatgttaaaaaaggtgagttagtttatttaactaatcttaacaaagtatatgtctatcgaatttatatgaaaaagattgttgatccaactgcggtttggctagtcgataatactaagaagaatattgtaactttgattacttgtgctgatggcggtaagaatcgttgggcaattcggggtaatctgattaaaactgaaaaggctaacaacaataatcttaaggtttttaaattaaaataaaaatttacaatctttaatcagatttagatttgcgataaaattataaatagattttgtaataaagacactcaacaatgagtgccttttcgttttgatgagagaacataaggtgtttgataattaatgaaatggcaagaaagaacagctgatgaattagcaccagacttgattgagaaatatcaactaggtcccattgcagccaaactttttgcattgcggggtattaatacagacgaaaaacttgatttttggtttaatgcaacagaagaaaatctggctgatccagcgttaatgcatgacatggataaggcaattaaccgaattaatcaagcaattgatagcggcgaaaagattacaatttatggcgattatgatgctgatggaattactgcaacgactattatgactgaaaccctaagcattttgggcgctgatgttcattattttattcctaatcgcttcaatgatgggtatggtcctaatatggaccgctatcaagatattgtagctgatggaaccagattgattatcactgttgataatggtgttactggggtcgaggaagtcaaatatgctcaagaacataatgttgatgtaatcattacagatcatcatacttttcaagaaaagaaaccggcagcttatgctactgttcattgtaattatcctggccaaaaatatccttttgatgattattgtggtgccggagtagcttacacgatttgtcgtggtctaatgcaggatactatgcctgagctgctagatttggctatgatcggaactattggcgatatggttaaggtgaccggagaggggcatattatcgttaagcgtggtttagaaatgcttaatcagacagatcgtcctggcttgcgcgctctaatcaaaaatgctggtttgactttaggcagtattaatgaaactgatgtcggctttaatattgctcctcgattaaatgctgtaggtcgattagataatgccaacttggcagttgagcttttgctaagtgatgatgaccttgaggcccaaaaaattgcagataagatcgaagaattaaacaataaacggaaagaattaaccaccgaagtctatgacaaatgtatgacgttaattcataaaaatagctggcaaaaacaaaatactttggttttatatgaccctgaatttcacgaaggtgtgttaggtttagtagctaataagatcgttgaaaagacacataaacccacgattgttttgactaaaaatgatgcaggtgaggttaaaggctcaggtaggtcctttgctggtttcaacttgtttgatgctttaaatccgatcaaggatcaatatttaaccaaatttggtggccatgattttgcctgtggtttatcattagaagaaaatcagattgcgccattacgggaaaaatttgaagatgactttcatgttgaaggtggtcttgagactaaaaaatatgacatggaattgcctatgcagggcttaactccgcagacactagcacaaatcaatcaagtaggtccatttgggacaggtgacacgcagccaatctttagtatctctaatccaacaatcactcatttctttaaaatgggtaaagataagaatcatgtcaaatttacggttgctaaaaaaggcggtaacttatcagttattggatttaataaaggctttttgaataataatcttttgccgtttatttctcaaatttttgttcaattatcattaaatacttatcgaaatcaagtttctttacaaggaatcatgaccggactagcttttgcttcaccaaaattggcagtgccaacgccagttgttgacttacgccaagagaaatatgttatgggtttcgcggaccgctacctgttatttgatcaaaaaaatattccgattgttcgcaaccgactacagatcgatgaagacaagatctctttagttaaagattatgatcaaactggtgaaacagttgcattattagatgtgccacgcaatcagattgaattaaatgctgcattggagaaagattatcaacaaatctatttacgctttttgcttgatcaattgcctgttgaacaaattcccgctaaaaattattttggtgctgttttaaaatatatttatagtcaccctacgttaaagccagcagattaccgtacagttgcaccttatttgggactagattatgatagtgtgcttttcattttacgagttttctttgaattaggctttgtaaaattggatgaaggtaaattggtaggagagccttctcctaaaaaacagccgctgacagcttctaaatatttaatgggaacttcttctcagattaaatttgttaatcaactaagaactatgcctagtcaacgtttgattacatatgttaataatttgacaaataaatagataactattctgttttcagtgcttttatcgttaaaatttgttaaaatatactggtcaaaagcgtttgaacacaaacacagagcattttggaggttatgcttcttatggcagttgattttagtaaatatattgcaagtgttaaggattttcctaacaaaggcattgtttttcgcgatattacaccaattttgcaagatggtgaattgtatcgtgccgctactcatgaattagcggaatatgcaaagagtaaaaaagcagatgtaattgttgggcctgaagcacgtggttttattgtaggttgtccagtagctactgagttaggtttaggttttgtacctgcaagaaagccacataagttaccaagagaagttgaacgtgcttcctatgatttggaatatggttcaaacagtttggaaatgcacaaggatgcgattaaacctggacaaagagtggttgtctgtgatgacttgatggctaccgcaggtactttaagagcttctaaagagctaattgaaaaccttggtggtaagttagttggtgccgcattctacatcgaattgccagatttacacggtagagataaattacctgatgttgatatttattcacttgttcaatatcatggtgcttaaaatagaataaataaaaagagggaattaaatcaatttgaactgagacctaaaagttagacacttttaggtctttttctacgtaaagtcaagcataataagaagtttggcttcattttttgtttaaatttcaacttaaacatcttttagtgtcgatttatttttttagttagacacgacaaataagcccagatccatatctgatttttgggcttagcgttataatgtacttgatcaattaattacgactaaagtctttttgattatgtgtggctacgttgtaatcatatggttgatcattgataatcagggcataaatggttctgattagtttatgaattgaagcaatagctatctttttgaaccctttggtttgagaggatagctttttgctttcataataatctgctatatgacacggatttgtcttagctgcattatcaatttgtccaatagctcgataaagcaacttacgtgcgactgcattgccatgtttagtaatacttaaattagagtccatttctcctgactgatatctgcctggatcaattccgataaaagcattgattttattaggattactaaatctgcgtaaatctcctaactctgctaaaactctgacagcagtggtctgtgcaaagcctggaatgctttctaggttttctaaatcatgattaggcaaagacttcgctaacttaaccattcttgcgattaaattttctctttgatcacttaaattaagcaatctgtgtgcataatactgcacttgctcgacttctatgctagagcaagatacaactggataagcttgataagctaattcaattaatttatctgcagtccttagagcgtgtttaaaagcaatcccctttaagctcattaaccagttaataagctgttttttatcttctcttcttactaagtcacaatgaggatatcgcacaactatttgccagtaatttttacctttagcagaagaaaataaattttcaatttcaggaaaagtcgattgtagagcttggtgaagtcgatttttagctattaccaagtcacttgtcagctggtcatagaagcggctcaaagcattaagctgcttataagtttgggattcgctttgattaaccggatggcgataaagtctttgaattaaagctaaatgataagcatcagttttatcggtcttgttgtagcgtagccccatattcatctcttttttggctttaagcggattaataacaacatattcatagccgtagtcttcaagaaaagcctgcagtctgcgtgaataaacaccggtagcttcaaaaataatttgcggatgtttagaaaaagcggttaattcatgaagcaattgaataaaaccaggacgattattagtaatggttagttcatttttgctttcaccaattagttcacaaacagtagaagtagacttgcttacatcaattccaaaagtaacttgcataataaaaacctccaaaacttagtagtaaaacgtatttacttaagaaatcagatctaattttctaaactcgacatctagtgtccacattcttcgaagagactattgaaaacttaagtaaaactgccagtttattatgcgacatcaagtgtctaaagacctcagggcatatcgttttaccactactttaattctacaaaagaataaaaatagtgaatcaattatcccgtcggataactaattcactatttagcttagaatgtttattatttgttaccgattaatttaaattttgaccatggtttaataaagtcgagcaggaataattcgtctgatctaatagaaccgactttgttcatccttgactccttatgaggttcaaggacaatttgtagttcatttttgtaatgaccaaagttgtcgttaccaatgataatatctccgcgttggaattctacattgttgtcgtgtactggattaggaatatctgcataagttacacggggcatggttgaacgaattacatccttagtgatatcaccacgacggaaatgttgaggcgcttctacgatagttttctcaatcttattaacatcagtaacgtagtttacgtgcaacatcaattgatagcgattaactttagataaggcttttaactcggcttcactggcataagcattaccgatgattacatcatcaatcaacccagaagcccagagatgcattgcttgcacatcaattggtaaattacggtcttgctcaagcgttggtaaaccatcttccacgttccaaggtcccatttgacctacttgacttgagacaaaagcggctgaatgaatgccaaactttttgaagcgttcagaacaagcgataaagaagtcgtaaggtaagccagtaccgcgttgaggataaaaattgtgacagccataaataaacggtgtattagcttggtaagaaataatattgttaagatagtcaacattattactcatgttgagttcaatgattagaccatatgggttgtaagaaagcattgcttcaattgcaccatcaaatgttgtgtcaagacggatgcctgctgcaccaatatcagcaaaaaatttcaggtcatcatagctgacacctagttgtttgaagattgcaggattaacatctaaaaaagtttgaaatcccaatttattgccatattcaatgatttttttatacttagctttggtttcttcagggctgccttgtacttcaagcatactcatgaagatacgagaaaagccatatttgtgagctaagtccagatagtgagcgttgccttcaaatttgctgtggcctggataaattgacagacctaaagatctcattgtcataatagtacctcatttttgataattgtctataccaattatatgatattttttattgtaggtctagtccaaagtgaccgagatagtttatattttggtagggtgtctcgctacgtttttaattaaacaggtgttatatttaaagtacagggtatgtgttaagaaggagaaattaagatggataattttgatcaagaatctggtcaacagcaatatgctaatgattcaggattaaatgttttttagcaaaatatatggttatatggccttagcggttttcgtttcagcaattagtgcttatttgacaatgacggtttttgcgggacctatctctgcctttattgcacaacaccaattgtttacggcgttacctttgcttttattgcaggtgcatatagtggacaaaatattgcttcagcatttgtagcttcggcaaccgtctttgtaacaatggcgattttaggaacaattaccaaaaaagatttgagtcgaatagggtcttatgcttctgctgcgttaattgggttgattgtagccatgttagctaatttgtttttacataatccaatcattgactacgttttttcgattattgctgtgattatatttactattttaactgcgtgggatgcacaaagaatgaaagatatttatttacgcgtggtgctagttaaatctttctagacaataagccaaattataagctaaaattgcaatttccaaccggctttgaaagcctatcagactacgtgctcgattgttctcggcattgtaataggtcagaagcgaaaagtcgctttcaattgttctgcgaatagccatcaattgatgatcattgtgctttttagctcctgtcatatttttacgatatggtgtccaaagttcataacccatttgttttagctgttgatgcagttctttgcctaaatagccttcgtcgccaagaagatagtaattagatggatgggcattttccagcagttcaactgtctccttggcatcatgaactgatgcttttgttacgacataatcaagaatgtaaccgtcatcgctaacaatggcatgaactttgaaaccatagaagtaaattttcttggtggccttataaccaatgttggcataaccgcgaaaaattttagcacgatagttgcgaattggttggcaaacaggtaccggaaagctgtcaatgatcaagaaatgtccattcaggtcaacctttttattcatttcttgccgtatctgataaatcaattgcaatagctgacgtgaacgccgattaaaacgtgagtgtgataaacaattgaaacattcacagaatcttctttgtgattcaattcctgtcttagcttgccagataagtaaagccaaaatcagactgtccgtagttttaatttgatcaatatttcgccgatgagtaaactcagccggtgcatacaaacgataccagtgccgacaaattatcactaaatctttaaaactaacttgtaaatggtggctaaaacgcttaagcttaagacagttcaatcagatcagactcttttctattattactatttacaagtcgagtctaacaagattggacttttttattaactaaaacgatttaactagcaccatgcgtatttatttacaatatggtgatgatctttcaactaatgggcttgcagttttaggtgctttgcaattatatcttgattttgttaacttgtttttacaatttttggatatttttggtgcaaatgaagataagtaattaaactagtgagactgtaaaatagtttgtgtaaggatgaatgattccttaaatttatttctttaaacattagaaaaaggagttcctttctcgtatgattggtttgaacaaaaaaacacatacagaaagaagaactccttcatgaatgattttaccaaaaatatagcacaagctctattcaatcaagacaaaataaatgatttattgcgcaaagagctacaacaggctgttaataacttgttagaagctgaattgactgcctttctgggctatgatccctatgccagaaatggctggaatactggcaactctagaaatggtgcttatttccgcaaagttgatacgcaatttggcccaattgaagtgcaagtgccccgggatcgcaacggtcaatttcatcagcacacgctgcctggctacaagcagcactcggatatcttggaaagcatgattatcaagctttactccaagggcgtgaccaccagggaaatagccgatctaattgaaaagatgtatggcagccattacagtccagctcaggtatcaaatatttccaagcagatgattccaaaggttgaggcttaccacaaacgcaagctaagcgacaagtttttctgcgtctatttggatgcgacataccttcctttgcgccgagaaacatttgagcgtgaagcagtctatattgccattggcatcaagcctaatgggcacaaggaggtcattgactactgcattgcgcctagcgagaacattgaagtctggacagatatgcttcaaaacatgaaatcccgaggcttgaagcaagttgagctctttctttctgatggtgttgttggcatgaaagcggccttgaccaggacttatcctaaagctcattttcaacgctgcttggttcatgtcatgcgcaatatctgtgctaaagtacgcgtcgacgatcgtgaaaagatcatgaacgaattcaaacaggtgcatcaacagacaaacaaagaagaagccacagctgtcctgcatgacttctataccaaatggggcaaggtttacagccatgttatcagaagcttgaaagacatagaaccagatctgctggtcttttataactatcccaagcagatcagagcttcaatttattcgactaacatgattgaatcatttaacaatgtgatcaagcgcaaagctaagcctaaggcagagtttccaactgaacagtcgcttgatgcttttattggcattcaggcaatgagctacaatgaccgttatttcaatcgaattcataaaggctttggtcaggttcaggacaccttagaatcctactttgattaaataaataattaaaaaatcaatttacgagaaagaactatttacacaaaagatttgacagtttcaaactagtttctaataaacgtaggaacacttcatatataaacgtatactatataaatatagtgacatattaagggagtgtttttatgaaaagatgcaagaattgggttgtgactattgttgcatttctgatgttagtgggagaaatcagtgttctgcctgcaaatttgcaggggtcgacatcagttgttaatgcagctattcatcacagaaggagaaagcatcaatatcgtgataaaactaagatttataccagtaattacagaattgttgataataaacgatcaaaaatctttcacgtaatgcgcggtcataattatcgaatgaatcgtgaaaatgcagttttcttcaagagtaaagcagcagcacgtgcagcaggatatcgtgaatcaaaaagataaattaaaagacttctaagagttcaaagttcctagaagtcttttaatttataaaatttatggtaataatctacctgtttttcatcacaggttggtaaattaagtcgattattatggcagcaataatcgctacaattacagtaattgctaagttttgaatggaaatctggaccattgcccaaccacaaagagctaagataaaggtcaatagaacatctgcaatttgaacactaccaaccaacttggatgggtaatcttgccaaaagtacttacgagttctagtaatcaaaacaatcaacattgcgctaagaactaggtatacgtaaaccatagtagaaacagcaccgtgactccaaccgtgtgtgtttaagaaccaaacaaacccaataccaattaaagtccaaccagcagctagtgaaaaggcgatcttagcaagcttagccatattccagttttctggcttataagtaatgtgagtcctgtcagttccaatcatcatcgtaaccatattgttcataatggtatagataaccattgcattcaaggccattgggatgtagtcaaagaaaagatagccaaaagttaacagcatcgttaattcagcagttctagcaagcttggttagtgaccaagtagtcattctttggtatacgcgatgtccagcgtctaaaattttaacaattgagcctagaccatcgtctagtaataccattttacccgaacgcttagctacgtcagcagcatttgaaactgcgattcctacttcagcttgttttaatgcaggcgcgtcgttaactccgtcacctgtcatccctacgatatagcctttttcttggaaaagctttaccatcttgagtttatcttctggtaaaacatcagcaataccggccaaatcattaatatcagtattttcattgaaatcgtgaatcgaaattactttaccagttaaatcaacttgttctgccactgcagcagcggtcttttgattgtcaccagttaacataattgggcgaacgccacgtttcttgagttcagccaaagctgctttagagtctgttctaactttatcttgtaagatgaagacaccagctaacttatcgtcaatcaagactgccactgagcgtcctgccttgaaattaattccagaaatttcttcatcggcatgtttatcgatcaaagataattgcttaaatgaaccaagctttacattatgtccagcaacatcagccatagaataaccagtgtcagaagtaaatggagtaaagttttcagcattcatgactggaatgttattttctactaagtattcatcgattgctgtatcgataataccagcattacgtttatcagttgcggctccagctaaagcaagcacgtctttgtcaggcaagtcacttagatcagtccaagcggctacggcagttttgttttccgtaattgttccagtcttatcaagtaaaagcaagttcaagttagctgcgtcctgaattccagttaggtcagaagtcaggactccttctttacttaagcgggttgcttcaaatgagttggataaagcaaaagttgatggcattgctacaggaattgaagcaataaacatcattgccaggaatggcaacatattaataaaggtattgaaattaccgcctttgaagaaggaggcgataataataactaaggttaaaacaccatctagtaagcaaaggtagtagataatcttagtcaaaagttgttgtaagtgaccaggagcagcggaattgttgatcaaattaatcgtcttaccgcttctagaatctttacctgtagcagtaacaacagctaggccatcaccttcaacaactgtagtaccggcaaaggcggtgtcatcaattgctttcttaactggtttagattcacctgtaattgagctttcatcacaagctaagttaccgtcaacaattttaacatctgctgcgagtacgtccccgcgtttaagtgagattaaatcgcctttaactagttgtttagaatcaagtttgatccacttgccatcgcgttcaactgatacagtaggagtcaacttgtgtgaaatattatttaaaactcgtcttgattgctttttcttagatgcaccgttaaatgcagcaaataaaagcatcaacaacacgaataatgattggacccatttgcccaagatacattctagaattaaagcagcttctagaatccaagcggataggttccataacttagacaagaactctttaaagaaattgtattcaggctctggtacttcatttaagctatcttcttttaagcgcttgtctgcttcggcttgagttaagccgtgaaatttatcagacattattttccctccaaatctaccttaataaggtagcacagatattgctatgaataaaatactaaaatacaatataagatattaaatattttaatatcactatcaattgaaataaaaaaaggataaataatatgaatctaaaacagttacgttattttctagttgtagcagaagaaaagcagattacagcagctgctaagcgcttgtatattgcacagccaccattaagctatcaattaaaacaattagagaaagagttgggcgcgcaattatttaaaagaacggcacatggtattgagctaactgatgtgggacaaatttttcaaagctatgccaatgaaattatttctctagctcaaaatgctgaaaaccaagtacataagactatttccggtgaattgggaacgattgcaattggaatggcatcttcctcaacgggcttgataccaatgaattcttttaatgaattacgaaaatattatccggaaatttcttttgatatttatgaagataatacttatggcatcctggataaattagaaaaaaagacaatcgatctaggcattgtacgaacgccttacaaccagacaggtttaaatactaagactttaacaactgaaaaaatgatggctattagtgtagacccagattttcagcaaaaaaaagaattacgcattaaagatctagcagatcagccattgattatttatcgtcgctttgaggatatttttaatcaaacttttgcacatcatgggcttaaaccattttatgcggttaagtgtgatgattcacggacagcaattacttgggccaagagaaaaatgggagtagcgctagtaccagaatcaattgcgacaacttatgcccaagaaaatatgatcgcaattaaacatgctaattggataacacatttgcagctggtttggcgtaaagatcatcaagttacacctttaatgaaaaaaatcattgctgcaatatgataatactgtaacttttacctaattgatccataataaatgtaaacgggtacaataattaatagaaggtggttgaatgtcgagtccgattcatgtttattcagaaattggtaagttaaaaacggtgatgttacatcgaccgggaaaagaactagaaaatctagccccagatattttgcatcgaatgttgattgacgatattccttatctgaagattgcccaagaagaacatgatgcttttgcgcatgtattgaggcagcaggggatcaaagtattatatcttgaggatttattagcagaatctttaacagatgagaaagttcgtcgggcattcttagatcagttactggatgaatcaagtattaaaaaacaggatcctttgcatcaattattgctgaactatctccaagaattgctaactaaggaaatggtaaaaacggtgattgctggaattagaaaaagtgcgattcataattctaccccatctttagcagatttggctgaggacccagattaccctttttatcttgatccaatgccaaatgtatattttactcgagatcaacaggctgcaattggttcagggatgaccattaaccggatgactttcagagctagacgacgtgaatcattatttatggaaacaattttgaaaaatcatcctgatttcaagaacgcaactattccagtttggcgtgaccgttatcatcatggtcgccttgagggcggggatgaactagttctaaataaccatgtgttagctgtaggtatttcacaacgcacttctgcaactgcaattactgacttagctcataatttatttgatcattcaagttatgatacgattttagcgattaagattccgcacaatcatgctatgatgcaccttgatatagtttttacaatgattaattataatcaatttacggttcatccctttattttagataaagccggcaaaattgatatttatgttctacagcccgatgatcacaacggtgtaaaaatcacagaaaagaatgatttggtgcaggttttgaaagaaaacttacatttaagcgaattggatttaattccaactggtggtggtgatccaattgccgcaccacgtgaacaatggaatgacggctcaaataccttggcaattgcaccaggtgaagtcgttacttatgatcgtaattatgtatccaatgatttgctaagaaaacatggcatcatcgttcatgagattcggtctagtgaactctcacgtggtcgtggcggtcctagatgtatgtcgtgtccgttgattcgtgaagatttataagaggcaaaaaatgaaatatttacaaaatgtttttcaaggtagaagttttctcgattgtaaagactatactccagctgaaatttcatatttaattgattttgcattacatttaaaagaacttaaaaaagagcatatcccacatgaatatctgaaaggtaaaaatattgcactactttttgaaaaagcctcaactaggacgcgatctgcttttgtagtagcttgtaatgatttaggtgctcatccagaatatctaggcgcaagcgagatccacttaggtaaaaaagaaagcgtcaaggatacggctaaagtcctaggctcaatgtatgatggaattgaatatcgcggttttgctcaagaagatgtagaagagctggctaaatattctggcgttcctgtttggaagtgggtgatggccgcgataatgttgccgacagtcttttagtttgtggctcaatgttaggtgttaatgtacatattgttacacccaagcctttgtttacacatcctgatgtacaaaaaattgctcaaaattttgcccaagattcaggttcaaaaaatttgatcacagatgatattgctcaaggcgttaaaggagccaatgttgtttataccgatgttggggtttcgatgggtgaaaatgattggtctgaacgaattaaattattaaagccatatacggtcacaatgaaaatgatgcaaatgactggtacaccagatgaccaattgatctttatgcattgtttgacagcttttcatgatcgaacaactcaggtgggagaagaaatctatgaaaaatatggcttaaatgagatggaagtaactgatgaggtctttaattcaaagtatgcttggcaatttacagaagctgaaaatcgattgcattcaattaaagcagtgatggcggctactttaggaaatttatttattccgattgcctgtggcggtggtggcatccttgttattgtgaaagatgggcatctcagaggtgttgccggcgtaattcataaagatttttccgctgctaaaatggcagaagatatcaacgctgatgaattagtaattctaacaacggtggatcatgcatttttgaattatggcaaagaaaatcaacaagcaattggtaaaataaaagttgaacagctcaaacaatatctagcagcaggttatttcgcagctgggagtatgaagcctaagatagaagctgcaattgaatttgtagaaaaaacaggtaatttagcaattatcacctctttgagcaatgccaacaaactagcagacggagtcggcacaatcatttataattaactgggtgataaaaatgaatatttttaatgaaggaaaaaagcaggatattgcccaagttttagcagctaaagataggcgagtagctgtacaacataagatttttaataagtatcctaatcaaactctagtcgacattaatatgaatatcccaggaccaatcaagaataatcgctatttaactaaaatgtttatgttgggtatcaatgagctggaaaatgcttggactaacctaggttatcattttaaattggtgacacagcttaatgatgatagtggctgtgaaaacttttatgtattatctttgtcaattgaaaaagtaaagcgctcaacaattgattttgagaatcagatatcattgggacgtctctttgatgcagacgtgttggtaaaaaataaacaagctgcaatttcacgcagagatttgggcaggcagccacgtaagtgctttttatgtgatcgccctgctaaagaatgtgctcgtagccggagacattcagtggaacagatgcaggcatttatctctcagctttatcaagaatacgttgcgtaaaataaaccgggattttatgattccggtttatttttatgaaaaatctagttaaaaatttaaaaaatgaactaaaatagtaatgaataaatttatagatgtacgtataggaataagcatggaattaaagaaaaataagaataatttaaagcaaattacggcattaattcaatatgcatttttgaaaaataatgatttgactaaagacgaaaattttatgagtcgttatgatcatagtacaggttatggctattttgataaggaaaaattagctagctatattatggttaatcgatttaaaagtgatgtttttgggcatcatttaccgatggctggaataggttatgtagcttcatatcctgagtatcgtggccaaggtcatatttcccaattaatgaaagaaattttgcatgacttacataggcaagatattccgtttgctaacctggcaccattttcggagagcttttatcgccagtacgggtttagcaatagtatttatcaaaaagaatatcgctttgatggaagcgcattgcgtagttttaaattaccacgttctggtcatatagtgcgtggcaagtgggacaatttagctgttcaaaatggtgtgattcaactttatgaacgtcaactgcatactgatgatgaacgtaacacggttgtacgtgaggcatggtggtggaatagacttgattcttattatcatcaccgcaatgtagccgtttattttgacgcggatgagcggccaattagttacttgatttatcgcattagagacaatacttttttagctgatgaaatgtacgcaattacgccgcagggattactgagtatgtttggttttatgggttcgcacgcgggcagtgttaagcaatttaaaatgagcgtaccagagaaatcgttacgagctgaactttttcctgaacaaaacgaactccaagttgatttgcgtccttatatgatgagtcgaattattgattttgaaaaagttttggcttgtatgcggccaatgcaagaaggtgattttaatctggaagtcaatagcgatgaacagtgtccttggaatattggagtttggcaattaagtaatcatggacgtaaggtagcggtagaacgtaaggaagatgcattggttgatttttcgggatcaattaccgcgtggacccaggtgctattaggtagactaaccatgaatgctgctgttaaactaggattaattacagattaccgcatcaaaaaattagatttcgttaaaggcgatgtatcattttatgattatttttagttgtgaggttaaaaaatgagtaaagaaaagaaactcaatttaataaaattatttggcattgtagttagtggtttgaatttgatcttttttgccttgatggcacttaataagcatgaagatactaaggataaaagaagagtagcagaagaaggacacgcaccgctggatgaaaaataaaatgacggaattaaagattgcatattttgaccaattaggtcgtaaggaattagatcaggcagtgcagcattttgtgttaaaacatcctaatgtagatgtaaaactacttgcgactagtcatgatggtgcttttgcaaaactgaatgaagatgaagcagacatagcaatcaatgatttgcgtgacgagaatcttaactttgatgaaacagaattgactcaagctggtgtaatggcaattttgcccaagggaatgtatcctaatggcattcaaatgattgaaaaagacgagctcaatgatatgacttgttttattgtggctaaacctgaagaagaggttagtgagctacatttatttaaagatttgtatcaaattggcagtcaattcatcgcttctaactcggtcgaagaagcagcactgttggtcgcctctaggtctggctattttattttaaatgagaatacggctaggttaattaatactacagatttgcagccacttttcttgcttgatcatggtcagttaataaagcaaaagataatggctttttataagtcaaattcagcgttaagtagtgagtttataaagctattgcagcaagaatattaatctgtaaagttaaaaatatcttgtctaagtactataagatactgtaaaatatattatgaaagcggactcatatattttacattctggagatgatttttatgctaaaaagaactttgttacctttaacatcaatggtacttgttttaggattaactggtttggctagtcaagttgagactgttgatgcttcaacttatggtaatggtgtacaggttactattccaaaaaagatgcagggtacttggtactcttatgatcgtaatgcacataatggcacaaagatcacctttactgaacatactgttaatggcaaaccaatatttacccaggaggcttcgacaattagtgattacttcaatggtagaattgctaaccagaagaactttgataaggtaacgcaaaactggatgtctggtaaaactaccaaaatgaagaatgatacattctatgagattgatccgtggattacttttgaaaattggagtctttatcgagtggtaccacaaaccattaatggtaaaaagcataacgtgctggtttattctagtagatatgatggtggtaactacttcagaagcaagaaattagctaaaaaaatgaaggactacaagtttaagaaagttaattacacgttatagttttgtgacatcccttaactaagggatgttttttactaatagacgcgataaaatttagtataataatgacaaaattaattcttggaggagaagttatgaaattaaaacaaacaccaattttgcgtttatataaactagaaactaataaagaggatcatgcaaagttcgttaaggcagggcaacataatatgcttacttctcaagaaaacgaaccaggcacattgtttatgcagacaagtcatgacgaagaaactactaattttgtagtagaatgctatcaagacgaagcaagttatgatactcatgctaattcaaagcaatttaaggattttactgacgttgctaaagatattttaactagtcgagtaaaggtagaattgtttccggaatttatttctacaaaggcagaaaaactagcagttaccggatcaaatgattatgttatttatctgactgaaattggtgtttctttaggtaagggcgatgagtttgctcatgctgtaatgaaagaaatgaaaacggcagtcgaagaagaaaaagatattttggcaatgattgcaggaactgttgccgatcaaccaaatgaatggttagctattgaagtttatcgtaataatgaagcttacaagcagcacttggaaactaagaacttcaaagagtatttgaataatacaaaatattgtgttgaaagtaagagtttacgtaagttgcaaccagatgtaattgttgaccaaggtgcaattttctaccaaccataaagaataagacgaaaagaagaccaggctatgtggagtacataacctggtctttctagttagaggggaaaagatttattaacatatattattctggtttttagtggcgatgttttacctttgctactgctggtttattaattaatactgagctgatggccattaaaccaagcgttaaaaatgatccaccaattaagagtagtttaatcaaggttctcattcctttcatcttaattgatcttataatagcgaaataatattaagaatttatatgtaaaacctaatggattagttaagaaaataaaactagaaaaaaggctgaaactgtcaaatcttttgtgtaaatagatctttctcgtaaattgattttttaattatttatttaatcaaagtaggattctaaggtgtcctgaacctgaccaaagcctttatgaattcgattgaaataacggtcattgtagctcattgcctgaatgccaataaaagcatcaagcgactgttcagttggaaactctgccttaggcttagctttgcgcttgatcacattgttaaatgattcaatcatgttagtcgaataaattgaagctctgatctgcttgggatagttataaaagaccagcagatctggttctatgtctttcaagcttctgataacatggctgtaaaccttgccccatttggtatagaagtcatgcaggacagctgtggcttcttctttgtttgtctgttgatgcacctgtttgaattcgttcatgatcttttcacgatcgtcgacgcgtactttagcgcagatattgcgcatgacatgaaccaaacagcgttgaaaatgagctttaggataagtcctggccaaggctgttttcatgccaacaacaccatcagaaagaaaaagctcaacttgctttaagcctcgggatttcatgttttgaagcatatctgtccagacttcaatgttctcgctaggtgcaatgcagtagtcaatgacctccttgtgcccattaggcttgatgccaatggcaatatagactgcttcacgctcaaatgtttctcggcgcaaaggaaggtatgtcgcatccaaatagacgcagaaaaacttgtcgcttagcttgcgtttgtggtaagcctcaacctttggaatcatctgcttggaaatatttgatacctgagctggactgtaatggctgccatacatcttttcaattagatcggctatttccctggtggtcacgcccttggagtaaagcttgataatcatgctttccaagatatccgagtgctgcttgtagtcaggcagcgtgtgctgatgaaattgaccgttgcgatcccgaggcacttgcacttcaattgggccaaattgcgtatcaactttgcggaaataagcaccatttctagagttgccagtattccagccatttctggcatagggatcatagcccagaaaggcagtcaattcagcttctaacaagttattaacagcctgttgtagctctttgcgcaataaatcatttattttgtctggattgaatagagcttgagcaaaatctttggtaaaatcattcatgaaggagttcttctttctgtatgtgtttttttgttcaaaccaatcatacgagaaaggaactcctttttctaatgtttaaagaaataaatttaaggaatcattcatccttacacaaactattttacagtctcgtttcgagcctgcattattatcttattgtatgttttatacgcattatttgggagttttagtgaatatttatttaaatatgctctgaattcaattactgctggtaattttaatacatatgtttattggcaaataatgcagtttgttttagcattattcacttcgttgcttttaccaattactaccgttgttttcactaggcagacgcaaaactatctgcataaaattcggcaagaaatcatgcatcattactattatgaaaaaagtgatgaaaaagtctctagtatgcagaaccgattaacagccaatttaaaaatcttatcagatgattatgctacaccttggattactatcttaagtggggttttagagattgtgattgctattgttttactagcaagcatgaactggattctaattttggttactgccattttagctgtgattacactttttgctcctaaaattatggagaagaaaacatcagctgccacagataaagtaaataaaaagaatgaaaagctgttaaatacaattgctcattggcttggtggattgcaggaactacgtcgttatagtgcatacagtcgtttggttaagcaaattcatcgatcaagtagtgattatgtggacgcaagtaagggtagtgcaaaattaagaagtgtaagttatttgattaatgcttttagcaattcaattgcacaaattggtatgagctttattgctggaatcatatttttgcttaatatgatttcattcggtgattttgcagttgctagtggttttgcatttacgattttttcagcaatttggaatattactcagtcgttaacgcaagttaagtcaactaaggctttacgcgaacagattaccgatttaagaaagcaagttcctgatgaaaataaagataaagtatcagcctacggtcttaaagtttcaggcttgtctgtaaaatacgatcagggggaaacaattttttatcctgattttacaataaaaaaagggcagaaagttttgcttactggcgattcaggaacaggaaaatcaaccttgtttaatgttttgttaggtaagctaaaacctgaatctggtacggtgacctatctagatgaaaatgaaactatcattcctgaaggaaaagctagaattggtaatatgccgcaaaatccagtagtttttcccgcaacgatcaaagagaacattacaatgtttaacgaaaatttgcaggataagcttcaagatgttgttcaagcagttcaactccaatccgacttagccaaaatgccagatggtgttaatacaacaattgatctaaaaagtgaaaatttgtctggtggacaacggcaaaaagttgttttagcgcgaacggaaatacacgagcaatcgtttgttttaatggatgaagtaactagtgcgatcgatcaaaaagctaccgaaaaaatcattgatgaattgctcaaaacagatcaaactattttgatgattgctcacaactttacgccagaattaaaagcaaaatttgatcaagaaattaaattaaaaagtaagaaaggggataaagtaagatgaatttgaaagcttttattaaaaccaatccagttcgtttctggttaactgcaattggttggattattattcctgctttatcaattaccaatacttacgttgtacaagaagagacgaatatccttttaagtcgtaattggactaagtttattttaatcaatgttcttgcttttctgattatgttagttgactatggtgtgagtgctttagttgattatcagcagcaggctcaggtacaagacttaaatgatcaagttagagataaaattgttaagcgatattattatgacgggaaaaagcatactgttgcacagatgcatagactgtaaaatagtttgtgtaaggatgaatgattccttaaatttatttctttaaacattagaaaaaggagttcctttctcgtatgattggtttgaacaaaaaaacacatacagaaagaagaactccttcatgaatgattttaccaaagattttgctcaagctctattcaatccagacaaaataaatgatttattgcgcaaagagctacaacaggctgttaataacttgttagaagctgaattgactgcctttctgggctatgatccctatgccagaaatggctggaatactggcaactctagaaatggtgcttatttccgcaaagttgatacgcaatttggcccaattgaagtgcaagtgcctcgggatcgcaacggtcaatttcatcagcacacgctgcctggctacaagcagcactcggatatcttggaaagcatgattatcaagctttactccaagggcgtgaccaccagggaaatagccgatctaattgaaaagatgtatggcagccattacagtccagctcaggtatcaaatatttccaagcagatgattccaaaggttgaggcttaccacaaacgcaagctaagcgacaagtttttctgcgtctatttggatgcgacataccttcctttgcgccgagaaacatttgagcgtgaagcagtctatattgccattggcatcaagcctaatgggcacaaggaggtcattgactactgcattgcgcctagcgagaacattgaagtctggacagatatgcttcaaaacatgaaatcccgaggcttaaagcaagttgagctttttctttctgatggtgttgttggcatgaaaacagccttggccaggacttatcctaaagctcattttcaacgctgtttggttcatgtcatgcgcaatatctgcgctaaagtacgcgtcgacgatcgtgaaaagatcatgaacgaattcaaacaggtgcatcaacagacaaacaaagaagaagccacagctgtcctgcatgacttctataccaaatggggcaaggtttacagccatgttatcagaagcttgaaagacatagaaccagatctgctggtcttttataactatcccaagcagatcagagcttcaatttattcgactaacatgattgaatcatttaacaatgtgatcaagcgcaaagctaagcctaaggcagagtttccaactgaacagtcgcttgatgcttttattggcattcaggcaatgagctacaatgaccgttatttcaatcgaattcataaaggctttggtcaggttcaggacaccttagaatcctactttgattaaataaataattaaaaaatcaatttacgagaaagaactatttacacaaaagatttgacagtttcgtaatcgggactttctgtattgaaaaaatgaagagataatttgttattgatctcaatttttaaatcttttttgttaacggtaagcgtataacagtgtcgtttgcagataaaaccatttcttaataaaaaatctacgattggattttcatttgaatcaatcatgacttgcaatgcttggtgctctgcttgaactatttttgaaaatggaatatttacagagtaatcacttagattgaattttagataaatatatttgttatgaaaaagattgtgataagtagaaatagtgcctagatgcttatcgttatcagttactttgtagattttaggagatattttttcaatttttgtagtcattttttatccttttgataattgaaattaatttttgatcggttccgtttttaattatgaagttataaatcggttcataattgagcacagggaaaataagatcaggatcaattttaggtataatgtcaatcattgatttcttactaattacgttgagatttttaacttcttgagcatttcttatctttctttttgcttgtgaaggaggataaccttgtccccaaggctgttcaaaaagattttttatagtctgctcaaaattgatttcaccactccaaccccaattaagtcctagtggaaaggagacaacattgccgttattgatatgaccaaaaagaaaagcatcttgtggagtggggatataaccacattgaatattaggaaaagtatttcatgcaagcatcattccttgtccagaagtacatcctgtcacaatgaagtcagtcgccttgctattaattaataatgcgacagctagggaaacttgcacgtaagatagactagccgaactatcttgataaataccaaaattgaatacttgatcattggatcctacagattctttgatatacttctctaatatgaaatttttacttttttgcgatgtagcttgaataatacctattttcatatttttaacctctatagtttattttttgaaagcgctttataatattatataggaagtaaagtaagaaggtgaacgtgatgaaaaaaattattgttggaactcctgttaaattgagccatgttttaatcggtatgattgtggtagttttactttcactatttttgacaggatttggttatcaagcttggtggctattccttattgtactaattttaggtgtatttgtaactttacctacttgttttaatccgtattggcagattagtagcgaaaatattacaattataaattatgatattaacgatgtgataaaattgatgcaactgctagggttacataaaaagagtaagcaagttattaatttatctgatgtaaagaaagctgccgttgtctatcgtaaaaatgtacgtcttagtcctattgactttaatcctgattatttaaatttgattttggatttaggtaagggaacaaatatgactttgacacttggaaatgtcgactatcagcaactaaattcgattatgggtttgttacaagataagaatattgtagtagatgataaacaaaatattttgcaacttttaagagaaaataaaaacttgtttaaccattttcacaagaaaggctggacatcgctataaatggataaagagcaaataattagaaattattttcgagcatggctaagtcctaatcttgaagtagtccaaaatacatttgacgaaaatgctatttatagtgaatgctatggtccagtttacagaaataaaaaggagataatatcttggtttgaaaattggaataaacaaggaaaagtaattgcttggccaatagaaagactcataattaatggtgatacgagcattgccgaatggcattttaaatgtaattatcaaggaaaaattagtgaattcgatggtgtatcaattatagaatttaatgatcaaaataagataatttctgtaaaagaatatcaatcaaagtccaaacattattatccctatagtaaataagacttttaactgttaagaggttaaaagtcttattttgaatatgaaatcttttataaactaatttctgtggaaaaaattaccaagccagcttcgtttctttttagcctcttcttttcgtcgctgttcacgatcttctaacattgccttagctagcatatcaactgtttgagtcaattgtgcttggttatctctttgttgcttatctctaaatgaactactgttttgatacttattcattaacgtatcatcatcaagccatttatcaaagttttcaacatcaataataaaaccggtgctagtttgttgcgatgcaatgtgatattttctaggcaaatatttaaagtagcgatcaagcatagtagaaccgctgtttttcgccgtttgatcggagattttattgaaaagttctttattgatttgggcttttagccggtcatcttgtttaataaataagatatcgcttccgatttttgcttgattgattaacattccccaatcatttcgaccaacaaatagggagtaatcgtaattttcttcaaaatatttgctgacttggttatacatatcaaatttatcaagtgcagtttttaaaacatgcttgattggatataagaagtctctttcaatcttctgcgcatcttcaacactaacgttagtaaagaattttgctaattcaacttgacaatatttaaaaagatcatcatttgcacgactaaataagctagttaatgcagcattacgttgatcactttcacctgaaaaagtagattcaaagcttaaataccataaacgacgcataatttcaggctttagagaaaattgtgatttaatagagctttcttgtctattcatcgtgaaaatgaatgctggtgagggatgagttaaattacgattgttagtaacttccttgatgaatctttcaaagtaagtacgggttgtaagctcgggactgacatcatcaatcattaatggacttacaggaccatttgtatatacatagtcacttagcgtgttggtaattgtcatattgatattactcttgccaagggcataattctttggatccatcattccactatctaagaaattatgagcaccaattaatttagcggctagtcttttccctagggtggacttaccagttcgaccttgtccgattagtgctgtagcaataggcacgtcttctctagatacattgcttccagataattcatataaattgcggattttccaaagccatggtgattcatatagaaacagcataaagtcacaagcttgccagccttcaccaacttctttgtaagtattatattcatgagtgatatcacagaaaagttgaagcgcattttttaattgcccttcagttaaatcagaagtaataacttcagaagggatgttatcaccaattttagaggcttggaataattgaccattattgtaaaactgaacaggaacagggaagagatcttcttctttttcaatttgtgatgtatctgcttttgcctttttgtcttgacgaataatgtgctgagtcaagctatataaatcttgcccgattgtatctagcttacgtcttttattgccaccttcaccaaataaagtaactgtttgagaagcaacgagtttttcattttcagataatttctttaattcatcatctttgctgtagtggtcgcgatacttttttatctcttcagctgggagaataattatgtctttaccagttgaattaggactgtttttgatttcaagagaagaatcttgcattacatgaatgcgaagatcgtctttatttttgtcttctaaataaccagatagttttttagcattaatataagttgtagcctgattaaggttatcttgaaacatttgttgatagcaattgaataatggatcagaagtattgccgtaatcccaaactaattgttccatatttttattaacagccgtatcggtaagattcattgaacctgaaaaggcagagtacttgctttgattttccattaaataaagcttagtgtgaatcaaattctgtttggtgaaaaaaagctgtaaactaccatctaaaatacgtttagtgaagggactatcttggtgttcgtagctatattcaatcaaatcacgacgtttatttaaaatttggtcaattcttttgccaattgaatttgatccattatcggttagtccaagaattagtgtgatctggtcaaaacgtggtataagattttgctcaataaatttaatattagaaacaaaggaaacgcctttaaactcagagaatttatttgactctctttgaaaatcaactaattgccaaaaatcggcattggaaattagtttttgatcagtatgatttagtatttctaatcccatataaaatcctttcgtgagtatacaaacatttgcttttagtgtatcgtgaaaaattggattagagcaaggaaaagttaatttattattgaatttatgaattagattaagtaaaatctgattcaaataacggaagtaaaaatataataatacgcgtggtgctagttaaatcgttttagttaataaaaaagtccaatcggactagactcaagttgtagtatcaaaaagaaaagagtctgatctgattgaactgccttaagcttaagcgttttagccaccatttacaagttagttttaaagatttagtgataatttgtcggcactggtatcgtttgtatgcaccggctgagtttactcatcggcgaaatattgatcaaattaaaactacggacagtctgattttggctttacttatctggcaagctaagacaggaattgaatcacaaagaagattctgtgaatgtttcaattgtttatcacactcacgttttaatcgacgttcacgtcagctattgcaattgatttatcagatacggcaagaaatgaataaaaaggttgacctgaatggacagttcttgatcattgacagctttccggtacctgtttgccaaccaattcgcaactatcgtgctaaaatttttcgcggttatgccaacattggttataaggccaccaagaaaatttacttctatggtttcaaagttcatgtcattgttagcgatgacggttacattcttgattatgtcgtaacaaaagcatcagttcatgatgccagggagacagttgaactgatggaaaatacccatccatctaattactatcttcttggcgacgaaggctatttaggcaaagaactgcatcaacagctaaaacaaatgggttatgaactttggacaccatatcgtaaaaatatgacaggagctaaaaagcacaatgatcatcaattgatggctattcgcagaacaattgaaagcgacttttcgcttctgacctattacaatgccgagaacaatcgagcacgtagtctgataggctttcaaagccggttggaaattgcaattttagcttataatttggcttattgtctagaacgatttaactagcaccacgcgtataataatatgttatcggaaactgtcaaatcttttgtgtaaatagttctttctcgcaaattgattttttaattatttattcaaaataagattctaaggtatcctgaacctgaccaaagcctttatgaattcggttgaaatagcggtcattgtagctcattgcctggatgccaataaatgcatcaagcgactgttcagttggaaattctgccttaggcttagctttacgcttgatgacgttgttaaaggattcaatcatattggttgaataaattgaagctctgatttgtttgggataattgtagaagaccagcagatcgggctcaatttccttcaaacctttgatgacattgctataagctttattccatctggcatagaatttgtgcaagacagctgcagcttcttttttgcttgtctgttgatgtatctgcttgaattcgttcatgatcttttcgcggtcatccacccggactttagcacagatattgcgcatgacatgaaccaagcagcgttgaaaatgagctttaggataagtcctggccaaggctgttttcatgccaacaacaccatcagaaagaaagagttcaacttgcttcaagcctcgggatttcatgttttgaagcatatctgtccagacttcaatgttctcgctaggtgcaatgcagtagtcaatgacctccttgtgcccattaggcttgatgccaatggcaatatagactgcttcacgctcaaatgtttctcggcgcaaaggaaggtatgtcgcatccaaatagacgcagaaaaacttgtcgcttagcttgcgtttgtggtaagcctcaacctttggaatcatctgcttggaaatatttgatacctgagctggactgtaatggctgccatacatcttttcaattagatcggctatttccctggtggtcacgcccttggagtagagcttgataatcgtgctttccaaaacatcagagtgctgcttgtagtcaggcagcgtgtgctgatgaaattgaccgttgcgatcccgaggcacttgcacttcaattgggccaaattgcgtatcaactttgcggaaataagcaccatttctagagttgccagtattccagccatttctggcatagggatcatagcccagaaaggcagtcaattcagcttctaacaagttattaacagcctgttgtagctctttgcgcaataaatcatttattttgtctggattgaatagagcttgagcaaaatctttggtaaaatcattcatgaaggagttcttctttctgtatgtgtttttttgttcaaaccaatcatacgagaaaggaactcctttttctaatgtttaaagaaataaatttaaggaatcattcatccttacacaaactattttacagtctctgttatcgctttggagaaaattatgacaacagtatattttgtaagacatgctcaacctgatttatcagttcatgatgatttaacacgtcctttgacagaaaaggggttgcaagatagaaaaaaagtaactgattactttagagataaacacatcgaccaagctttttctagtccattcaagcgtgcaattgatacaattcaaccagttatagacgagaagaaactaacattatcatctatttctgactttagagaaagaaaaattggtgatgagtggatttctaattttcatgaatattgtgaaagacagtgggaagattttgattataagctaagaaatggcgagtctttaaaagagacgcagaagagaaatgttgctgctttgaagctagttttgtccaaatatcaagatcaaactatgattattggtggacatggtacagcaattggatcagtaattaattactatgatccaagctttaaatatgaagcctttgctatgatccagccaaagaatccatttattgtgaaaatgaactttgatggagaaaaatatttggagtataaagtagttactttttagtaaaaagataatctcataaagtaaaaatggtaaatcaaggtactaataaccagatttaccatttttttatttgttatattatagcttatgttaaattttatcctgagcaatgaaattatcataaatggttttgataactacttcttcatcttgccgtctggtaccaatcataattgagatttgggatgcaccctggttaatcatttgaatggagatgttctttttaccaagagggtaaagcaagctagcacataaagtcagcttgtccttcatcccttcacctaccaccattgtgattgcataatcatcaatccactgcatttgatcaggatttagactagtttgaatttcattacagataacatcaattaattgatcagttaagacatcttttttgaaaataatggtaatatcatcaattccagatggcatatgttcatatgaaacatgatgtttttgcaaaatttccattaacttcaaggtgaaaccagcacctttatttaacatatattttcttaaataaagggccgcgaagtttttgcctccggcaatacctgtgattgtgtgtttaggtataaagccgtcctctggtacgatcattgtcccaggtttttctggagcattagtatttttaacattgacaggaatttcgccttgaatagcaggaattaaggcttcatcgtgaaagacggaaaatcccgcataagatagttcccgcatttcttgataagtcattcttttaattggcttgggctgatcaacgatatggggattggctgaaaaaatagcatcgacatcggtgaagttttcataaagatcagcgtttaaccccctagctagaatagcaccggtaatgtcagaaccaccgcgagagaaagtagcaatatgtcctgatggtgtaatgccatagaagccaggaaaaatgatcttttcatcttttgcagccttaattctttttaagttcacataagtttcaggattgacttcagcattattagaagtgccagtgacaattaaacctacatcttttggctctaaaaatcgtgctttaattccttgatgatttaaaattttagcaatcaaaattgcattaagacgttctccgtgtgctttaaaggttgccatgcggtagtcattattagggtaacttagcttcggcaatgtaagtagaagctggttaatatcctctaattctgcttcaggcagctcaaaatattgggcaattaattcataacgcttaaaaatacgggtagcgatgtcttgataattattactcctcaagctcatatatgcgtaagtgatcattagatcggttactttaatatcatcctcagttcttttgcccggtgctgagactacaacgacttgtctttcgggatcggcattaataatacttagggccttatctacgctattacctgaggctagggaagaacctccaaatttaacaactttcatatctatttttccttaattattatttcaaatctaaaattgaactgatttctttttccatatcatttggttcaataattttttcggtcttgggttcacgatcaaaaagggcacgcacaccgattgataattgaccgcctaattcatcatgcaattctttaattgcaccgacgccagtttgcatactaggaccaccagtgatggcttcatacaccgtttctgggaacttatatggactggctgttgaaacaatgaccattggggtttgatcgccggtcttcttttgatattgatttgctacaaaagagccaacagcagtatgtggatcaattacatagcggtcataattgtagacccgtttgatttctgatttaacctcttcttctgttgcaaaaccagctgcaaaatttttttgtaatttagtgaaaacttcaccgctaacttgataatgaccgcgttgagtcaattgattcattaaactagcgacttcatagttattttcgccataaaggtcaaataaaagtcgttccaaattgctggaaactaggatatccattgctggtgcattggttaaatggaacttacgtcgcttatcgtagacaccattattaaagaaatcagtcaatacattgttttcattagatgcacaaatcaactttttaataggcaaacctaatttcttagcataatatccagctaggatgtcaccaaagttacctgttggcacagcaaagttaacttcgtctcctagtttaatttcttgtctgcgtactaattgtccataggtgtagaggtagtaagaaatttgcggaaccagacgaccaatattcatcgaattagctgaagaaaattgatagccattagcattaagtcggtttttgaaagaatcattgttgaagatttttttaacttcagtttgagcatcgtcaaagttacctttgattgcaattgcacgcaaattgttgccgcgttggctgagcatttgcttaagttgaacaggactaacgccaccttcaggataaaagactatgacatcggtacccttttgattagcaaagccacgcattgatgccgtaccagtatcgccagaagtagcggttaaaataataatatctttatcaatcttttcaatttgaacagctctggtcattaattgtggcaacatttgcaaagctatatctttgaaggcaagggtaggaccgtgaaaaagctccatgtaaaaatggttatcgtgcttttcgattggaacaatgctgcgatcatcccattgttcactataagcgctttgaactgcagtggtgatttgctccttagtaaagtcatcaaagaataagctaataaccatggcagcgatttgcttgtaggaaagtttggataaatcttctaacttaaaattagcttgaggaaaggcaacaggcacgtaaagcccaccgtcttgagccaagccttgaataattgcttgaggtgcagttaaagtgttttcttttgaacctctagtactacgatattgcataaacaatcttcctatcttatgaaatattaatattataactattgtaccttgattagcacctatgatacaatcgtaaaaataagaaaatcattaaaaagaggataagatcaaatggccatcaaaattgcattgcttggattaggaacagttggttcaggtgttttaaaaataattaaaaataataaaaagaagattagacaaacaagtggtgaagaaatcatcattgaaaaagctctagtacgtaatccagaaaaacatcgtaatttagctaacgaagtgatgctaactacagatttcgattcgattttgcaagatcccgaaattaaaattatagttgaattaataggtgggcttcatcctgctaaggaatatattactgcagcaatcaatgctggaaaaaatgtagttacggccaataaagacttaatggcaacttttggttcagaattgattaatttagctgcaagtaaaaagtgtgatttaatgtatgatgctagcgttgcaggtgggatccctattttgcggaccttggctacctcttattccagtgacattatttccgaaattcaaggaattattaatggtacgacgaattatattttgtcacaaatgggggaaaagggactaagctacgaggaagcgctgaaaaatgctcaagagctgggctttgcggaggctgatcccactaacgatgttacaggtaaggatgcagcatacaagattgtaattttaagcaagtttgcttttggtactaagattagtattgatgattttactattcaagggattaataatctaaaggattttgacattaaacaggctcagaagttaggctatgtcattaagctgattgggattgccaaaaatattaatggtaaattatttgtagaagttgctccatgtttgttgccagaaaatgcgattatggcgcatattaaaaatgaactaaatgctttacaaattaagagccaaagcctaggaacagcagtattcacaggcccaggtgcgggtagctctgcaacggctaattcagtcatgagtgatgtgattactgaaataaaaaacgtagtgaaaaagaccaccggtcagccatttagtaatttctcccatgttatgcaattaacaagttcggaggatgtgaagtattcctattatttatctttcgaagcagaagagaccttgtttgatttgagtaaattactctctgatttggaaattccggttcgtgagattaaacaagtacaatcaagaattgtagttgtaaccgaaaatattagtcgacagcagctacaagatttagcgattcaagatcaatatttaaaagctagctataagattttgcagtaaaggaagggaaaaaatgattattaaagcaccagcttcaacggcaaacttgggtcctggctttgattcacttggcatggctgtttcactttatttggaagtagaagttttaagcttagccgatcgctttcaggtggatcatgtgatgaaaggaattccacatgatgaaaaaaatttaattgttaagactgcactaacagtttatccagggttaccaccgcttcatttacgcgttaaaagcaatatcccattggctcatggtttaggtagcagttcaagtgctatcgcagccggaattgaattggctaatcaaattggtaagctgggactatcagatgaagaaaaggttcaattaggagctaaaatcgagggacatcctgataatattgcaccgactattttgggcggcttggttgttggtgctgaagttaaccatcattttgatgcagttgaagcaccacttcctccatatgcgttggtggcttatgtacccgattataatttggaaactaagacagctagagcagttttgcctaaagaattagcttttggcgtagctacgcatggctcagcagttgctaatactttaattgctagtttgtttgctcaagactaccctaaagcaggagaattaatggaacaagatgtattccatgaagtttaccgagaaaaactagtgccagaacttgtaaaagtgcgggaggtagctcattcaaaacatgccttggcaacttatttgagcggcgcaggttcaacgattatgacgtggattgaagataaacatgtagctggatttttgtcgggcttacgtaaacatgatttaaaagatgagacattaatcttacatcctgatgaacacggtgttcaaattatccaataaaaagactgaccaagcggtcagttttttagtcgtcaaaggttgcagcaaaactatcaccatcgattagcattcttttagcattgacagcataccaataaggaataacttcagtgccattttcttgctctaattcacagtcggccatttttaaaatttggtctaaatttttagcactgatgttagggtagagcttcagtaaagcttcttgagtaatgccactttgtttaaagccactagtgggataattggcagaaaaaatatcagaaaaatcatctaagtcatatctaggcttaaattctccatcaaagtatttgatttcgatgttttcaatttccataaaggcaccaagttgttttgccatgtaagggaacttattagctagttgttcaacagtaaaaccattgtttgctttagttcgtgcattgggatccagtttaaaccaagcttcacgtatattatgactatcttttctttcaataagaaggtctttgactttttgaatagctgcattgtgtctgtttacggctttttgccagtctaatcgattaggatataactgtctatagcggacagacaagggatgatcgattgcgttgtagataaaattcagcttgtcagtggtataagaagttagttcatcgtcacgccacattaattcatagtaagaactcatgaaagacacctttctatttggatagactaattaatattaactgaatagtatcattttttgctccgattaacaaaagtgataaaaatgtctatttagattggtcagcagcaaaacttttgttaaaattaatgtgtttactattagtatttgctcaaaggatttgacaaactatggatcaacttgataagttcaaccgacgctacaattttctttcaaaattgtcagctgccttcttttattcaattgcggttgcagttgccttgaactttttttggacgccggggcatatgtactcgtcaggaatcacgggttttgcgcaattaattaatactgtaagtgaaagatatctaccgtttacattatcaacatcaatgatgtactttcttttgaactttcctttatttatattggcttggttcaagataggacataaatttactttcttcaccatcgttgctgttgttctaggttctatcatgatgcacgctattcaaccttggcagatgcacctggacccactggtttgtgcgatttttggtgcttcgatcaacggtattggaactgggatggcattaaagaacggtatttcaactggtggactcgacattattggtattgtaattaggcaaaaaacgggcattagttacggaaaatttaatatttttattaatttgattattatcgctgctgcgggatacatgtttggttggccacgtgctctttattccgccttgactatttttattaatgggcgagtaattgatgcggtttatacccaacaccagaagatgcaagtaatgattgttactcagcacccacagcatattatcgatggtattcaaaaccggatgcatagaggaattaccattttgcatgatgctgaaggtgcatacagtcatattgaaaagacagttttgattaccattattgatcgatatgatatgtatgatattcgccaaatcgtgcaaggagcagatccgtatgctttcatgagtgttagtgaagttgaaaaagtatatggtcgcttcaaggagcaagaaatcgtttaatggatagcccttaaaccttgatatataaggatttataaatgaaatttgaatcctaggggcactttgggagcaaaactattcaaaaagaagcagaaatgcttcttttttatttggagtggctttttgtaattatggctttattattggtctttgttaaaagtgattaaaaatgatattatttcgattgagggatgttgatatatcgtggatcatttagtgtattctccacgagtgtggaggtgatcctatcatcttgaagggcacgggagacaaggcagagtattctccacacatgtggaggtgatcctactgttaacggtgatgactggtatccagttagcgtattctccacgtgtgtggaggtgatcctactttgagctgtgtcaacgccacagccgtttagtattctccacacatgtggaggtgatccaagtcgttacatcagccaaaagatgaggcttaagtattctccacacatgtggaggctaaatagctgctctgaaaaatatgttctatagagtgactgtttttgtatattatttaaaaatattgttgatggtgcacggagattgcgttcacttatatagtgaaaagatgctaagaaatctaaaatagaatcgagatgaattggtaatctggtaatcgtaagaaggacttagctactaatcgttgtattcaattttgataacaaattaattaaagagcaaaaaatatgaagaattataaatttaataagtttatgtaaaaacagtgtcattaagttaggctattgattttggtgaaaaaacaattaaagcatcatttggctttagacggccagattgatgccctttttggcatatttttctaaatatcattcgcgttacacgtaaaagcgtgtgttgtatatagtgaaaggaggctaagagaatcggagctaagaggtgacaaatatgccgaaagcctataaaattaactcatactggcaaaaatactaaatggtcattaaagttctatcctaaaagagctttgttaactggtgttttgattgtgattgctatagcattatggaaagtgatttttaatggctaaatatacagaagtaaataaaaagtggaatgataaaaatgaggcccgtaagctttacattaataagaggtcaacgacgaaaaactttattttaaatcttgctatcgaagatgatttagaacagattgaaaaggatattgaagaaagacgcaataatttgtaaagaaataaaatgggatacatcaggtaataaaaagtgcatctcatttttatttgtatataatactagttaacttaaaaaagcaataaaattcaaataaaatggaggtatttcaaagaatgacagagaataataaacaagccaaaaccactgataccaaggcaaaacccaacaacgacacagcaatcttcgctggcggttgtttttggtgcatggtcgaacctttcgatacagttgacggagtagaaaaagtagtttctggttatactggtggtcatgttgctaatccaacatatgagcaagtctgttcaggtacgactggccatactgaagctgttgagattacctttgatccagcaaaaatatcgtatgatcaattgctaaactattattggcaagtgactgatcccacagatgcaatggggcaattccaagatcgtggtgataattatcgacctgtaattttttataattcacctgctcaaaaagaagcagctgaaaaatctaagcaaagattacaagctagtggtaaatttgataaaccaatcgtaactaaaattgaaccagctaagccattttatccagctgaggaatatcaccaagatttttataaaaaagatccacttagatatgcaatggaagaagctggtggaagagctaagtttatcaaggaacattgggattaataaaaagcagatcataactgttataagctgtgacctgcttttttactttcaatattttagattatgttaactatttctttaagttgcttttgataacctcgattggattgagccaagttccgttgttaacgttccaattcttacatggaaaaccatatttgtttatgtaatctttatttgtttgagtaacgccaaggtgtaagtgtgagccagttagcttaccgatcttttgatctaatttaatcttttgaccagtcttaacataaatgtcttttttcttattaaacccttcttggtaaacttcaacgtaattatcaggactaataacccagatgaaccagccaaggccgttgccataagcaacctttttaacagtaccttgatgaattgcatatacgttagaatgcccaacttctgaaaaaccaaaatcccaaccatcatgaaagtaggaaggtggtgtagtagaacgcatatagttagttatgccaaaagtttgtgcattatacattggacgaacaccatttttcttgttggctttaaacggataagcccacttgaggttcttgggttgaacttcagttgtattttgtgagtcatcaagcgtatcagcagaagcagtggtggttgataaaccaacgcttgaagttaataatgcagtacctaacaaagaaattattaatttacgaaatttcattataaaaagaaaccagataagttctgatttttatctcctctcttaattcacctaaactattgtagctcagcagttttacgagaaagttacaattaaatttcgattaataacaaaaagttagtatgagtatatgtgaatatgtttttaattacgagtctaggtatttttgaaatttctttactttattttgggatttacatagaattaaattaataacgtttacattgaatttagtaaatgatagtagacattaatttggctcaaaaataataatttggacgaaactgtcaaatcttttgtgtaaatagatctttctcgtaaattgattttttaattatttatttaatcaaagtaggattctaaggtgtcctgaacctgaccaaagcctttatgaattcgattgaaataacggtcattgtagctcattgcctgaatgccaataaaagcatcaagcgactgttcagttggaaactctgccttaggcttagctttgcgcttgatcacattgttaaatgattcaatcatgttagtcgaataaattgaagctctgatctgcttgggatagttataaaagaccagcagatctggttctatgtctttcaagcttctgataacatggctgtaaaccttgccccatttggtatagaagtcatgcaggacagctgtggcttcttctttgtttgtctgttgatgcacctgtttgaattcgttcatgatcttttcacgatcgtcgacgcgtactttagcgcagatattgcgcatgacatgaaccaaacagcgttgaaaatgagctttaggataagtcctggccaaggctgttttcatgccaacaacaccatcagaaagaaaaagctcaacttgctttaagcctcgggatttcatgttttgaagcatatctgtccagacttcaatgttctcgctaggtgcaatgcagtagtcaatgacctccttgtgcccattaggcttgatgccaatggcaatatagactgcttcacgctcaaatgtttctcggcgcaaaggaaggtatgtcgcatccaaatagacgcagaaaaacttgtcgcttagcttgcgcttgtgataagcctcaatcttggggagcatctgcttggaaatatttgatacttgagctggactataatgactgccatacattttctcaatcaagtcagcgatttctctggtagttacgcctttggagtatagcttgataatcgtgctttccaaaacatcagagtgctgcttgtagtcaggcagcgtgtgctgatgaaattgaccgttgcgatcccgaggcacttgcacttcaattgggccaaattgcgtatcaactttgcggaaataagcaccatttctagagttgccagtattccagccatttctggcatagggatcatagcccagaaaggcagtcaattcagcttctaacaagttattaacagcctgttgtagctctttgcgcaataaatcatttattttgtctggattgaatagagcttgagcaaaatctttggtaaaatcattcatgaaggagttcttctttctgtatgtgttttttgttcaaaccaatcatacgagaaaggaactcctttttctaatgtttaaagaaataaatttaaggaatcattcatccttacacaaactattttacagtctcatttggacaatgaaagtagagaataataatgacgaagttaaataatgaatatatggttggtctagatattggtactaattcatgtgggtgggttgctactgattttgataataatatattaaaaatgcatggaaaaagagcacttggctcgcacttgtttgatgaaggcgtatcagctgctgatagacgagcttttagaactactaggaggcgtataaagcgaagaaaatggcgtcttaaattgttggaagaaatttttgatgaagaaatggcaaaggtagatccaaatttctttgctcgtttaaaagagtcaggactttctccattggacacaaggaaaaatgtgtcttcaattgtctttccaactaaaaaaatggataaacaattttataaaaaatttccaactatttatcatttaagaaacgctttaatgaaacaggataagaagtttgatcttcgggctatttatattgccattcatcatatcgtgaaatatcgaggaaattttttgtctaattcatccataagtaattttagtgcgtcaaagattgaaatcgataggtttgtaaatgaactaaacgatctttattccatatttctgccagaaagtggagtgatttttgatgcaggaaatgcttcaaaagttgaagacattattcgaaatgaacaaatgtttaaactggataagataaaagaaattgctgatgtgttacccgacactgaaaataagtctggtctaaaactaagtaaaaaaatttcaaaagaaattagcaaagcaattttaggatacaaagcaaaatttgaaattattttacaagtaaatgtagacaagactgacagctcaatttggaattttaaattaaatgatgaaaatgcggatgtaaatttgagtgaaattacttctgatttaactgatactcagttacagatattggatttagttagaaacttatttagtgcaatttctctactgaatattgtcgatgaaggttcaactttatcggaatctatgataagaaaatataacgatcatgcccaagatttgaaattgctaaaaacagtaatcaagaaccattcagacaggaaaaaagctcacaatttacagttggcttacgacaaatatgtcaataaccgtcattttgttgatgttgaaactaaaaaagcctttcccaacaagcacctttatcgaaaaagcgatttttatgaaatagttaaaaagaatttggatgcatcaaaagaggcagttcaaattagaaaagaaatagcgttagataagtttatgcctaagcaacgaagcgatgaaaacggcgtaattcccttccagcttaatcaaatcgagctagataagataattgaaaatcagggaaaatattatccatttttaaaagagattaatccaattaaagctcatcgtatgcaggcaccttataagcttgatgaactgattcgttttagggtgccatactatgttggtccaatgattgaaccaacaaattcatcttatcctcaaactcgacaaaatcaatcttttgcttggatggttagaaaagctaaaggtcgaattacgccttggaattttgatgaaaaagttgatagacaaaagtctgcaaataactttattaaacgacttacaacaaaagatacttatttgtttggtgaagatgttcttccagcaaatagtcttttatatcaaaaatatactgttttggatgaattaaataaaattagtgtgaatgggaagaaattatctgttagcgtaaagcaagaactttatgaggacttattcaaaaagaataatactgtctcagctaagcagcttaaaaattggttaatagaaaatcagaaattgccttatatcaaaattaaggggttagctgatcaaactaaatttaattctagtttatctacatacattaaattaaaaaagtcaggtttatttgttgataaacttgactcaaatgaatttcgtgatgattttgaaaaaattattgaatggtcaactatttttgaagataagcagatttatatacaaaagcttcaaacaattgattggcttacagcaaaacaaattcaattcctacaaaatattagacttcagggttggggcagattatctaaaaaattgttaactgctattgtagattcaaatggtcaaaatattattgagcagttgtggaatagccaacaaattttcatgagtatagtaaataaagcagatataaaaggcacaattacagatgcaaatcaagatctcatgcattcaaatagtatggaagatattttatcagaagcgtatacttctcctgcaaataagaaaatgattaggcaggttgtaaaagttgttcatgacattcaaaaagctgcttctggtcaagcacctaaacaaatagctattgaatttgcacgtgaaagtagaagaaattctaagttatcacaaacacgagggcataagctacaggatatttaccaaaaaatatcaggagatatagtaaataaaaatttgaaggataagctggctgaatatatcaagaataatcaattaagtgtctgggaaaaaactagcttccagatgaataaaaacgatcaagatttccttttttaagaatcttgatcgtttttttgttctctttaaaatttttaacaataaaaatcggcccttcagccaccttctttgacaatatttgttcaaattcatcatcataaaggcaattccgatatcggtttcgaccttctctttacctcgcaggtgcgttctgcgcatgccaaatacgttcttcaaatgtccgaaaactggctctacatcatattttctcatgccatagatgtgtctgccttcttcgctttggagaacttcttttgctttttcttttaaatattgccagttaggattatagcgaacttggcgctggcggccgctagctgttttagccaattgttccaattctggcgttagctggaactcgtctgcctcataaaccttaaaatcacggacctgaccagtagaacgatccttgcgctggctgtaatatttgaaattgaatctgacgccatgatgatcaatgtaataatcatctttttcattgtagtaccagttgattagcttagttggatcattcttatactttttggtctgttctttttcatacatagtgtagggaataaagtacttcttgtctggatatttttcctccagcatcgaataattgtattcactgccatagccagcatcggcgacgattttgtcaaacttgtccaacacggtcatttgatccaaaaccggctccaaagttttgaaatctgtcggattaggaaagatggcataatcaactacatattgatcggtcgtgactgcttgaatattgtagccaggctttaattgaccatttttcatgtggtcttccttcatatgcataaaggtggcgtcatgatctgttttggaataactgttgcgtccggcaaagatctcttcggcttcttcatatttttgcattcttggcacataatcttttcttagccggtgcagaatcttttttagtccacgtcgcttggcttttcgaggtgaaccgccaggaatggctttgttttcctgctcaatctctttagtcagcttgttaatttctgcttcagtttcttgagctaattcctttagcccctgactagtttgaactttttctttttccatttctttgactacttctttagtaatcaattcatcataaagttcaactgcctggcctttcagcttttcatgatacttttcaaccgctttgcgccagacaaatgtatagcggttagcatcagcttcaatcttagtaccatcgataaaagcagcaccttcattgattaagccttcatcttctaacaggttagtgaagtagataaagctctttttaatcagttcattggcatggctgcttgatctaaaattattgatagtatgatatgaaatcttttgctggtcagccaagatcatcattggcagattttcttccagcatcaactcaatctttctgccagaaaaaactcttctggagtaagcaaaaagcagtattttgagcatcatggctggatgataggctgggcggcccgttttagcagtcttgcctactaaaacatcttctggaattgaatctacaaaccagctgatgacattagccaaatgattggccggaatggcaaaatctagattaagtgttaaagcagtttgacctgtgatataattcttgtacatgttagtttccacctttttgtttttattttgtgatgatttaataatatcaaggctggagctaaaagtatacaaaaagagcgttgaaacaaaaattcaacgttcttttttcatgatctgagacttagttttttcccagacacttcatgcaacttggaagagatgcttatactggtaagccaattaatattgatgaagtatctcagtattatgacatagaccatatcttgcctcaaagttttattaaagatgattccctgaataatcgtgtgttggttgctaaaccaataaacaatggtaagtcagatggagttcctttaaaactctttggtgataatctagctactggtttagggataacggttaagcagatgtggaataactgggctgataaaggactgattaataaagcaaaacaaaataatttattcctagatccagagaatattaataaacatcaagcttcaggttttattcgtaaacaattagttgagacaagtcaaatcataaaattagcaactacaattcttcaagctgagtatccaaagactaaaataatagttgtcaaggctagttctaatcactatttacgtaatgagtttgatttgtataaaagtcgagaggttaatgattatcaccatgcaattgatgcatatttaactactatttgtgggaatctactgtatcaagcgtatcctaaattacggccattctttgtttatggtcaatttaaaaagtttagttctgatcctaaaaaaagaaaatgaaattttaaaaaagaccaaaaattttgactttgttgccaaacttttgggtagtaaagcaccaaatgagatcagatctcaacaggggaaagttttatttgaaaagaataaaattcgattgcaacttaataaggcatataattacaaatatatgcttgtatctagagatacgacaacaaagaatcaagagatgtttggaatgactatatatcctcgggctgaacgggatatagcgaagagtcgtaaattaattgaaaaacgtaaaggattttcaacagatatttatggtggctatactggtactgcagcagcctatatggcaattgtaagaattaataagactaaatcttcacagtacaaagtaattgctgtacctatgacgaagcgtgctattttaaataaagctgaaaaagaaggtaactatgaaaagattctaaagcaaattttatcaccaagtattttatacaacgataagggaaaacgaaaagcaggagtaatatcatttgatattattaaaggtaaagttccatataaccaggttgtgcaagatggcaataaaaaatttttgttaaagagtgctatttatttatgtaatgcaaaacagttggttttatcagaagaggcaatgagagtaattactggtcattggctagattctgataagcaagatcaagaacttttggatgtttacgatgaaattttagaaaagattgatagatatttacctttgtttgacattagagattttagaaataaattacataagggtagagaaaaattcttgaaattaaacgctgaggataagtttaaagctattattcaaattttgaagggtttgcatgataattctgatacaggtgaacttaaagatattggtataactgtaccatttggtcaacttcaaaataattctggaattacattatcttcggacactattttagtttatcaatcacctactggtttgtttgaaaaacgcgttaagatttctagtttataaaaataaatgaggaaccgacatgtggttcctcatttttacataaaaaaagtccctcgatagctcgggacaagtgttgaaactctgcgtactaaaacgcattgcttgattttaaattatgattgttagatcaataaggttaagagttgggagctacccaacaaataaataatatcattatagatatagatgtacaaggagaaaaaatgggatggcgtaacgtaataataactcagcatgcaaagctaacatactctatgaatatgcttatagtccaaacaaaagatggtattaatcaaatacctattgaagatatcaatttggttttaatttcaacatcacaggctgtgattactagtgctttgataagtaagttagccaaaaatcaatgcaaggtaatctttgttgatgataaatatcaacctgttacagagacagtgaattattatcctggggctagggacataaagaagttgaaaatgcaatttgaatggaatgaaagaagaaaagaaaatttatggaccaaaattgtagctgctaagctaaaaaatcaaatatcggtgttaaaaaattatcgaattgatgaaactgaagttgagcaagagctgtacaagttagaggtgaacgatttatccaatagagaagcagcggctgctagaaaatatttcatgaagttatttggtaaggactttattagaagaaattccggagtgattaatgcagcactagattatggatactcaatattgctttcatccttcgatagagaaattgcaatgaatggatatttgacttatctgggaatacatcatcattcagtggaaaatcaatttaatttagcttgtgatttaatggaaccatttagatccatagttgattattgggttaaggcacacgaaaatattaccagttttacaccagatattaagtatggattagttgagttgcttagcttacaaataaaattcaatggtaggaatacaattttaacgaatgcaatttctgtatatgtaagaagctgccttagatatttaagtggagaaacagatgatattagaatagagatgagtttgtgtaatgaggtaccgaatgatgcgattaatgataatgtttgatttgcctacggacactgccgctgaaagaaaagaatatcgacaatttagaaaagctctaataaatgaaggatttttaatgattcagttttcggtgtatgaaagagtatgtgtcactagacaaacagctaattttttagaaaagagaataagaaaatttatgcctagcaaaggtgttgtgcaaagtctaatggttacggaaaaacagtacagtgatatgcatttcttggttggggatgcagtaaaagatattcgcaatacttcagacaggacagtgatactatgattgtttcctatttgtcacataagaaaatctgtttaaaagatggaattaatgttatttgcactcaaagtcccattgcctataaagatctggttttaggttttcaagccttaaatgatctaatagtatgttctgatgacgaatacaacaataagtctattagtaagagttttgattttgtaggagccccgttgttaaatgacaatattatggcaaagtatatgaatgtcattattaagaactttatttctaacttggatgaggtaaacagaaatagaattttaaaatctttttattcattagaaacagtattgaatgattctttgcttttggaagatttacctttagaaattgattttagcgaagatattaaaaagctgttgaaaatggttaacattcatttagatgctcaattaatgttaacgagactgtaaaatagtttgtgtaaggatgaataattccttaaatttatttctttaaacattagaaaaaggagttcctttctcgtatgattggtttgaacaaaaaaacacatacagaaagaagaactccttcatgaatgattttaccaaaaatatagcacaagctctattcaatccagacaaaataaacgatttattgcgcaaagagctacaacaggctgttaataacttgctagaagctgaattgactgcctttctgggctatgatccctatgccagaaatggctggaatactggcaattctagaaatggtgcttatttccgcaaggttgatacccagtttggaccaattgaagtgcaagtgcctcgagatcgcaacggccagtttcatcagcacacgctgcctgactacaagcagcactctgatgttttggaaagcacgattatcaagctctactccaaaggcgtaactaccagagaaatcgctgacttgattgagaaaatgtatggcagtcattatagtccagcccaagtatcaaatatttccaagcagatgctccccaaggttgaggcttatcacaagcgcaagctaagcgacaagtttttctgtgtctatttggatgcgacataccttcctttgcgccgagaaacgtttgagcgtgaagcagtctatattgccattggcattaaacctaatggacataaagaagtcattgactactgcattgcgcctagtgagaacattgaagtctggacagagatgcttcaaaacatgaagtccagaggcttgaagcaagttgagctctttctttctgatggtgttgttggcatgaaagcggccttgaccaggacttatcctaaagctcattttcaacgctgcttggttcatgtcatgcgcaatatctgtgctaaagtccgggtggatgaccgcgaaaagatcatgaacgaattcaaacaggtgcatcaacagacaaacaaagaagaagccacagctgtcctgcatgacttctataccaaatggggcaaggtttacagccatgttatcagaagcttgaaagacatagaaccagatctgctggtcttttataactatcccaagcagatcagagcttcaatttattcgactaacatgattgaatcatttaacaatgtgatcaagcgcaaagctaagcctaaggcagagtttccaactgaacagtcgcttgatgcttttattggcattcaggcaatgagctacaatgaccgttatttcaatcgaattcataaatgctttggtcaggttcaggacaccttagaatcctactttgattaaataaataattaaaaaatcaatttacgagaaagatctatttacacaaaagatttgacagtttcatgttaacaccatatgctataattgaaacagttcttaagattcatcaagaatataatcttgatagtattcccgtgttttgtaatgtagctcattaccttgatgaaacacagttaaaagaacttagtaagattgttagacaacttaaattgaaaattattttaattgaattcacagataagaaatatggggtagcagtcaaggatgctcaagttgcatatattgatcgagatcttgttgattggtattagacaattgattaaaaagatattatgaaatatcggttttagatgattgttagatcaatgaggtttagatcagtagtctccaattcaaaaggtgcttacgtgttttagatgattgttagatcaatgaggtttagatcaagcacttgaatcttgtccctgctaggaacgttttagatgattgttagatcaatgaggtttagatctcgaatttagaaaaatcaacattaacgcgggttttagatgattgttagatcaatgaggtttagatcccgtgaaaacggcgtttacatgcgtaagacgttttagatggttgttagatcaatgaggtttagatctattagcttttgcggcggtaccaacgtacggttttagatcaatgaggtttagatctaaagaaataaataatagaggtgtgaggtagttttagatgattgttagatcaatgaggtttagatcccactatcgcgcctggaatacctgttttctgttttagatgattgttagatcatgggagtcagaacagtaatatgcataaatttacaaatatttttctgtaaataaaaatcgctctagagaaactctagaacgatttttggacatacttgatcttagtatctattattacttagcgtaatcatcaatacccaagtgctccaaaataagtgcggcagtttcttcaatggagcggtgagcaacattaattacatagcaacctaatttcttataaagtgcttgtgctgattcaagctccttgttgattgaatccatattagaataagtagtatcaggattcaaaccataagcgatcattctttgacgtctgatttcgttcaatacagatggatcgttagtcaagccaataatcttcttaggatcaatttcgtagatttcttttggaatgtgagtttcaggaacaagtggtaaattagctacctttaagttcttattggctaagaacaaagaaagtggagtcttagaagttcttgataccccaagtaaaacaacgtcagcttccaagaaaccttttggatctttaccatcatcatacattacagcgaattccattgcggaaattctgtcaaagtacttttgatttaagctatgctgtgcaccaattttttgatctggtgtcatatgagtagtttgttgaattgcttcaactacaggtgagaagatgtcaacacattcaacattatgctcacgggcaaatttgataactggcatttgcatttcatctttaaccaaactgtagataattaccaagtttggatatttttcaatttctgttaaaacttcgtccaacttcttttggttagtgataaaggggtaacgacgatagttgatattgcagttaggaaattctgcagctgcagctgtggcgttactaaaagcagtgtcaccagccgcatcagaaataataataatgtttaattcattttggtcttttgtttctaccatattaagctcctcgtgtattattaaatatctttctgaaaataattatactattaatgaaagcggattaacaataaaaactcagctcttttattaaggtaaagtagtcggtttacttaacttaaaaatttatcaaaaagtttttgaattgtattgaccctaaagattagtttggtataatttaagtaaatgtatggcgtaacgccaagaaatggaaggagggatcacacatggctaagacaatcgttcacgaaaacgagtctattgatgatgctcttcgtcgtttcaagcgttccgtttcaagaagtggtaccttacaagaataccgcaagcgcgaattctacgaaaaacctagtgttcgtagaaagttgaagtctgaagctgcacgtaagcgtagacattattaataaactactgagaaagctacctgtttttgggtagcttttctttttgacttcttgaagcataattttgattatgttaagtaaatatttgttagttttattttagttaagaacatagtttgttataatactattgggtttttaatagaaagaaggatattaaatgagtttgtcagatcaaatcatggctgatatgaaatcagctatgaagaatcacgacaagacaactcttaatactgtccggatgatcaaatcggccttaatgaatgaaaaaattaaagcaggacacgatttaactccagatgaagaattaactgttcttaatcgtgaaaagaagcaaagagaagaatcgattgacgaatttattaaggctaatcgtgatgatttagctgaagaaaccaaaaaagaattagcagttgtagaaaagtacatgcctaagcaaatgaatcaggatgaacttagagcagctgttaaggaaacaattgatgaagttggtgctaaaggtaagtccgactttggtaaggtaatgaaagctttaatgccaaagattaagggacgtgccgatggcaaggctgcttcgcaatcagttcgtgatcagctaaattagtagtaacaagaaggagcgggtctatttggctcaaacaacttttacacctcaaagaccagaaaatattcaaaaactagttggagttaatgacggaaatttaaagcttctttctgaaggttatgatctttctgtgtcagatgtcggtaatgagattgtcattgcaggagacgatgaagagaagatcaagaaggtagttgctgttctaaaggcactcgatagtgttgtgaatactggtgttaacatcggtgcgcccgacacagtaagtgcgatgaagatggctgacaagggtaccacagagtactttgcagacctatataaaaaggttttgattagggatgctaaaggtagacctatcagagtcaagaatatgggacaaaagcgttatgtcgaagctattgataaatctgatgttgtctttggaataggaccagctggaacggggaaaacattcttagccgtagtttgtgcaattgccgcctttaagaagggagaagtttctcgaatcattttgactaggccagctgttgaagctggtgaatcacttggatttttacctggtgacttgaaagaaaaagttgatccatatttgagaccaatttatgactccttgtatgctattcttgggactaatacgactgaccgtttgatggaacgaggcgtaattgaagttgctccacttgcttatatgcgtggacgaactttagatgacgcttttgtaattcttgatgaagcccagaacactacagatgcccagatgaagatgtttttaactagacttggatttaattctaagatggtcgtaaacggtgatatgacacaggtcgatttacctggtcgacagcatagcgggttaattgatgctagacatatcttgaagaatatcgaccaaattaaatttatcaacttttctgctaatgatgttgttcgtcaccctgtagttgcgaaaattattactgcttatgaaaaagaggacattaaacactaaaaatggatccaattgatattacttataatgatgaagttggctttttagatgatgaaaagcgtaactggcaagactggattatgaaacttttgctgctagctaagaaggaaattggcaaagataacaacttagagatgagtattaactttgttgacgaagatcgtagtcatgaaattaatttaaagtatcgtgacaaagaccgtcctactgatgtaatttcctttgcaattgaagatggtgaggattcaattgatcttgcagcatttgcagatgatccagactttcaagaggatatcggtgatctatttatgtgtcctagtgtgattaagcgtcacagtaaagagtatggtacaggttttgatcgagaatttggatatacaatagtccatggctttttacatttaaacggctacgaccacattaagccggatgaggccaaagaaatgtttggtattcaaggaaaagtgttagaagattatggtttgccattgtatcctgatcaattagatgaaggcagaggtaaataatggaagaaaaagagtttaagtctggctttgttgctttagttggtcgtcccaatgttggaaaatcaactttaatgaactatttagttggtcaaaaagttgccattacgtctaataaaccacaaacgactcgtaatcgcatttcgggtatttatacttcagatgaaatgcaagttgtttttgtagatacgccaggtatttttaagcctcattcaaaacttgacgactatatggataaggctagtgtatctagtttgaatgacgttgatttagttttattcatggttgaacctgaggaaatgggtaagggcgatcaatacattgccaacttgttaaaagaagtaaaagttcctgttcttttagtaattaataaagttgatgaaattcatcctaataagcttttgccaattatggattcatatcacaaacttgagggctttaaagaaatactaccgatttctgctactcaaggaattgggattgaagatctgcttaaaacgattaaggaatatttgccagtaggcccacaatattatggtgctgatcagatcacagatcggcctgaatattttgtggtagccgagttaattcgtgaacaaattctgcgactgacttcacaagaagtaccacatgctactgctgtcgcagttgatcatatgaatactcatcaaaatggcaagctcttgattgaagcgactatctatgttgagaaagacggtcaaaaaggcattattattggtaagggcggtaagatgctcaagcagattgggattaattcacgtcaagagattgaaagattgcttggtgaaaaggtcaacttgcgtctctgggttaaggtccaacataactggcgttctgaccctaactttttaaagcgaataggctatgacaaaaaagaactttagttgaattactgttgtataagcgttgtcgaaagatgacgtcttttttgtatgtttagggagacaagaaaattctattcgttggataactaatgggataaaaatagatacaatagtaatgacaaagtgatgaaattttgggatctattgttttgtgattgttgttatattgggatttgtttactgtattctccacgtatgtggaggctgaaacccagtttcgaagttgattctgggtaaagtcttggtattctccacgtatgtggaggctgaaacagcagtctttttgtactatagactatttatgatattatgatatcttcatcagaatatctataaaaaatgaattttaaatactaaaggagtcatgatatggcacgtgaactaaaagaagttcagggtattatctttaaaaggcagaaatataaagaagcagatttattagccaaaattatgactaaacaagatgggattatgactctgattgttaaaggagccctgaggcctaaatcaagattaagtgcagcaacattaaatttttctattggtacttacgtaatttatacgagcgaaaagggcttaagtaatttacgcacatataaaggggcaaggcagtttgatggcttatataatgatttaaccaagaacgcttatatttcttttatttttgatttaattgatcacgcctttgtagaatatcagccaattggtaaatattatgatttagctttatttgctttgaaaaaaatagatagtggcgttgatgcagaaatgattacacaaattgtgcagatgaaaatattagcagcatatggtgttgagccacagctaaagcattgtgttatttgtggtaaggaaaaaggcgtttttgattattcgattaaaatgggtggagttatttgtagcgatcattttagtacagttactagccgaatgcatttaaagccaaaagaaactgctgtaattagaacaattggcttattaccgattgagcgattaggcgatattaaaattaatgaagaaacgaagagggctactagaaaagcgattgatcgtatttaccatgaaacgataggcctaaatttaaagactaagaaatttttagatgaattaaaactttttagttagtaaaaatctggttttaccatgacccatgtgttaaaataaaaacgtatttgacgatgatgaggatttaagaaaagtactagttcagcgaatgtcggtcggtgtgaggacatctaggaaaaggcacctctagtcatattgttcaattaagagcaggaaggatacttcctgaattagggtggaaccgcgataatatttcgtccctatgcaaaattttgcataggctttttttatggcctagcgcaggaggagattaaaggaaatggcagataagaaattaaatattcagaatatgatctttaagctggaacaattctggtcctccaaaggttgtatgattatgccttcatacgatgttgaaaagggtgcgggtacaatgagtccttacacttttcttcgtgcagttggtccagaaccatgggcagcttgttatgtagagccttctagaagacctgcagatggtcgttatggtgaaaaccctaatcggttattccaacaccaccaattccaagttgttattaagccagctcctaaggatattcaacaatattacctagacagtttgaaagttttaggtatcgatcctttggaacacgatattcgtttcgttgaagataactgggctaacccatctatgggttgtgctggtgttggttgggaagtatggcttgacggtatggaagttagccaattcacatacttccaagttgttggtgaattagatgttaagccaactatgagtgaaatcacttacggtgttgaacgccttgcgtcatatattcaggatgttaactcagtatttgatcttgaatggggtaatggcattctttatcgtgatatcttcaagcaaccagaatatgaacattctaaatatgcatttgaagaatcaaatcaagaacaattgcttcaattctttgatatttatgaagcaactgctaagcgtttattggataagaacttggttcacccagcatatgattacattttgaagtgttcacatacttttaacttgcttgatgctcgtggtgctgtttcagttactgaacgtgctggttatttatcaagaattagaaatcttgcgcatgaagttgctgtcaaatttgtcgaagaacgtgaaaaacgtggcttcccattgcttaaaagtgcagaagacaaaaaggcgggggtagaaaatggctaaagattatttatttgaaattggtactgaagaaatgccagctcacgttgtaccacgcagcgttaagcaattagctgacagaacaagaaaatttttaaaagaaaatggcttgaaatttaaagatattaagactttttcaactccacgtcgtttgactattttggttgaagatttggctgaaaagcaagacgatattgatgaagttaaaaaaggtccagctaagaagattgctcaagatcaagatggtaattggactaaggctgctcaaggatttgctcgtggccaaggaatgactacagacgatatctattttgaagaacttaagggtactgaatacgcttatgttcacgttcaaaaggaaggtaagaaagctagtgatatcttacttggtatgagcgatatcattaaggcgatgactttccctactaagatgcgttgggattcaaatgattttgagtttgttcgtccaattcactggcttgtttcattatttggcagtgatgtaattcccgttaagattttggatattactgcaggtcgtaaaactcaaggccatcgtttcttaggcgattcagttgttttggccaatgctgatgactatgaagatgcattaaaagatcaatttgtaattgctgatgcagatgaacgtaaagatatgatcgttcgtcaaatgaatgaattagttaagaagaacaactggcaagttaaaccagatcgtgatttactagaagaagttacttatttagtagaatatccgactgtatttgctggttcatttgatgaaaagtatttgaagattcctgatgaagtgctgattacttcaatgaaagacaatcaaagatactttgaagtctatgatgaaactggtaagttaattaatcactttattgctgttcgtaacggaaataaagattaccttgataatgttatttcaggtaatgaaaaagttttagttgctcgtttggacgatgctcaattcttctatgatgaagaccgcaagtatccacttagtcattttgttgatcgtcttaagaatgtttcattccacgataagattggttcaatggctgaaaagatgcaacgtgttcgcatgattggtgattacttagctaagcgttgggatttaccagagaatgtagtcaaggatttcgaccgtgctagtgaactttacaagtttgacttagttacccaaatggttggtgagtttgcagaacttcaaggtgtaatgggcatgcattatgctcgtcttgcaggtgaggacgaagaagtttcagttgcaatcaaggaacactacatgcctgccactgctgaaggtccacttcctgaaactacggttggttcattattatcaattgctgataaaattgatacaattgtaaccttctttggtgcaggaatgattcctacatcatctaatgacccatacgcacttcgtcgttatgcatatggtattgtaagaatcttacttaatgagaagtggtcattaccatttaacgaagttttaccagaaatcattagtatgcttaatggtgtaactccagctaagctacctaagagtgatgctgaccaggaaattgcagacttcattcgtgatcgtgtcaagcaatacttacaaaagaatgacttcaagtatgatattattgatgctgttcttgcttcaagtcaacaagatccaagtcaaattttagcagcagctactgtattgcaacttcaccatgatgatgaagaattcaagccagtagttgagagtttgactagaattgataacatcttaaagaaggctaaatttaagagtaatactgctgttgatgaaagtctctttgatgataacagtgaaaaagaactttacgctggcgttcaaaacttgcaagatattgaaagtttggctgatctctaccaaggttttgttcaactgcaaccagtgattgatcaatactttgaaactaatatgatcatggctaaggacgaaaaggtcaagaataaccgattagcacaattatatgcagttaatgaattagcagatcgtttaggtgacttaagcaagttagttattaagtagttaatttagatagaaaaagggtgattcatatggctggacggattcctgaagattttatttcagaggttcgcagtaacgtcaatattgttgatgttatcagtcagtacgtttcgcttgagaaaaaaggcaaagactatattggtctttgcccttttcatcaagaaaaaactccgtcgtttactgtaaatgctgataagcagttttttaagtgctttggttgtggtaagggtggaaatgtttttaaattcttgatgtataaggatgatttaacttttcccgaaagcgtcgagcgagtagctgagtttgcccatattgctatgcctaatggatatggtcataatagtggcaccaaattaaatccacttatgcaaatgcatcaggatgccgttgatttttatcatcgtgtgcttttgactactaaagccggtgaacgggggatgcagtatgctcaaaagcgagaactagatcaagaaatattagaccattttaagataggctatgcacctaaggctgataatgttttgattacttatttacgtagtaaaggttatcaagatgatgatctagcacaaagtggtttatttgttcaagctagggatgggcagttatacgaccgttttcgtgaccgtttgatgtttccattggataatgaaaatgggagaacgataggcttttctggtagacgaatttctgatgataagaccgaagctaagtatatgaatagtcctgaaacggggatttttaccaagtcaaaggtattattccactttgcagaagcaaagaaagcagctcgtggtgaaggtcacttagttctatatgaaggttatatggatgtaattgcagcatataaagcaggggtgaaatcgggaattgcctcaatgggaactagtttaactgatgaccaaatatatttgttgagacgtattactcctaatatcattattaattatgatggagatgatccaggagtccatgccgaagaacgtgctgcacgtatgtttaataaagatggcaattttaatttaggaattgtagttttaccagaaaaactagatcctgatgaatacgtcaaaaaatatggcgctgagaagtatctggaagaagtcaaaggtgccttaacgccgactgactttttcttaaaacggttggaacaaaaatataacttagataatgaccgtgaaaagattgcttatttaggtgaggccgtaaaagaaattgcacaagtgcgcaatccagttgagcaagatatgtatactgaaaaattggcgaagtctagtggggtttctattgcttcgttaaaggcaaatcttgctaaagaaagacggcgaaataatcgggcacgcaatcatgtacgtaattctcaaagaaattcacctgattatccgatagacgtacctttacctggtgatgaagacgtgcctacagagcagtcagtagttgaaaaaaatcctagtcagaccagactcttgtatttatttattcattcaactgatgctcaaaaatatatgttagaagggcaatttcattttcctaatcaggattttgaaactctggcacaggattggttaaaatatgcggaaactcatgaaaatccacaaattgatgggttcttagattttattcctgagcaacttcaaggtataatagtagatgctgaaatggcacagatgccaaaagattctacaattcaagaagttgatgctttggttctagcattaaaaagacgcaacatctattccaggctgaatgagcttcaagctcaattacaggatgctaagcgcaaaaatgatgcacaaggaattattgcaatcactcaggagattattggattaaaacggatcttaggttaataaggaggctttttagtggcagaaaaagaaactacacaaaaactatctttggataagatggttaagcaagtcgtaaaagacgtaaagaaagataagtcgatcactgaagaagatttcactgctcgtttgattaagccttataacttacaaggcaaggctgtagatcaactagtacaagagtttgaagataatggtattagcattgttgatgaaaacggtgatccttcaaagttagccttaaagaaacaaaaggatgttgaaaaggctgaattaaaggatatgtctgctccatcaagcgtacgcatgaacgatccagtgcggatgtatttgaaggaaattggtcgtgtaccacttcttactgctgatcaagaaattgctcttgccaaaagaattgaatccggggatgaagaggcaaagcaagaattagccgaagccaaccttcgtttggtagtttctattgctaagcgttatgtaggacgtggtatgtcattccttgatttgattcaagaaggtaatatgggactaatgaaagctgttgataagtttgattatcgtctaggctttaagttctcaacctacgcaacttggtggattagacaggcaattactcgtgcgatcgctgaccaagcacgtacaattagaattcctgttcacatggtcgaaacaattaataaattgatcaggatacaacgtcaattgttacaggacttaggccgtgaacctacaccagaagaaattggtgcagaaatgaatatgccaaccaataaagtacgtgatattctaaaaattgctcaagaacctgtttcattagaaacacctattggcgaagaggatgattcacacttaggcgactttattgaggataaggatgcaactagtccagaacaacacgcttcttacgaaatgttgaaggaacaacttgaacaagtacttgagactttaactgatcgtgaggaaaatgttttgcgtttgcgttttggtcttgatgatggtcgtacccgtactttggaagaagtaggcaaggtatttggtgttaccagagaacgtattcgtcagattgaagctaaggcattacgtaagttgcgtcatccaagtcgctcaaatcaattacgtgatttcatggattaattataattatctatattaaaagagctaagttttacttagctcttttttattggactggatctttacctgctgcccttagattatcttcaatgattttcattggatttaaccaagtgccattatctttccaatagtatttgcatggcgtattgtcatgctttttatcaatgtaatctttatctgtcttagtaactcctaaatgaatgtgagagccggtcagtttaccaattttttgtcccaacttgactttttgaccttttttaacataaatatcagtaatactgaggaagccttcctggtaaacttcaacatagccatcatcggaaataatccaaatataaagtcctaaacctggggcgtatttaacacgatggacagttcctgcatgcacagcatatacggaagaatgtccaacttcactaaatccgaagtcatagccatcatgaaaataactcttgctaggatagactcgacgaatgacgtcagtttcaccaaacttttgtccagatttaaatttgattttcttttcatagagcttcttaaaagggtaaccccaagtaagatgaacgacttttttctttttagcagtcttctttttcttaaccgtgtgagtttgtggtcgtaaactattcagattgttttgccataagggaatagaggcaaaagctaaaatagcaattaaagcagctaaaagtgcaaacttactttcagtttttttcattaaaatagctcatctcgctttccgtcaagcatatgttcactaattgtttgttcaaaaaatactggtaaatcatgatcaaaattgtaagctaacttttgctttttcaattctttagcactcatccaggttagtttaccttcgtctgattctttaacggtacccgaaaattgttcagctatgtagaaaaatactaaataacgttcatcattgtgatcataaaattgtttaacaccaactaattgaggatgactaatcgttaatccagtttcttctttgacttccctgacgacagaatcatgaaaagattcatgcgcttcaacatgaccaccaggaaaagtaagtcctggccagaccggatcgttgcgatcaagaactaaaacctgatctttgtttttaaccatgcacatattagttaatgtgacattttctgttctactcatgtaaaaaacccgctttctgtgacgattatatcaaatagtagcaaaataagactatgaaatatgctaaaatttggttaaccatatcttttatggaggaaacatgaatttaagattaaatacgttggcaaagatggtagatcctggcagtcgagtggctgatattggaactgatcatgcatacttgccaattgaattagtaaaaaatggcaaaattgattatgcaattgctagtgacgttgcagagggccctcttgaaaatgctaaaaatgatattgcagcagctgggttaaccgagcaaattgaaactcgcttaggtagtgggttagaaaccgttactcatgctgatcagattgatacagttgtgattgccggaatgggcggcaagttaatgactgatattcttgatagagcttggagcaaagatgcacaatttaaaactctggtactagaacctaatataggcgaagcaggggtacgtaattggctgatgatgcataattataagattatctcagaaaaattaattgcagaggctgggcatacttatgaattaattaaggctagcttaactgaagaaaagcatgagatgactgaaaaggaaatcttttttggcccctttattgtacaagaaaagaatccagttttttatcagaaatgggaaggccaactcgcttattatcaaagattcctggttaatttgaataaagcaagaaaaaaagacgaagatcgaatcaatgaagtagatcatgatattaaattaatcaaggaggaattggagaaatgaccaaagtaaaagacattgttgcgcgtttgcgacaagattttccggaaaacattgcttcacaaggtgatcctgttggtatgcaaattggatcaatggaggctgatgttaccaaagtaatgactactttagatgtacgtccccaggtagttgaagaagctgttgaaaaaggggttgatttcatcgttagtcaccatcctgtaatgtttagaccagcacaaaatttggattttgcgaatgcacaaaacgcaatgtatggcaatattatcaagaatggaattactgtttattcaattcatactaattcagataaagcccaagatggatctgctgattggcaagcagaggaactaggtctgcaagatgttgaaccattttgtctggatgatgatggaattgctatgggtagaaaaggaaagttacctagaacaatgactgcttatgattttgcctattatgttaaagaaaaaatgcaaattaaaatggcacgtctgattactgcaaacaatgaaaagccaattaccagtgtaggatttatttgtggggatggtggtaaatattggactagagccttagatgaccatttagatgcttttattactggggatgtttattatcatgtaggccatgatatgatttcatctggtttaactgttgttgatcctggtcattatactgaaaaactatttaagtacaaggtctatggtcgacttaaaaagtggaatgaagaaaataactggaatgttggaattgagctttccgaggtttctactaatccatttcaagacttattttaattagaaagagagttatatatggaatatcctaatttgttacctagatttttaaagtacgttaaagttaattcgcgttctgacgaacattcagatcgctttccatcaactgaaagagaagaaaacttccaaaagaatgttattatgaaagatttggaagaattaggtttaagtgacattcactacaatcaaaatgctggtagtgtaatcgctgaaattccgtcaaatgttgattatgatgttccagtaatgggctttttagctcatagtgatacggcagactttaattcagaaaatgttaaaccacagattcatgaaaattatgatggcgaaagcaaaattcaattaggagattcagagttttatcttgatcctaaagtttttccacatttgaagaattataaaggacaaacaattattacggcctcaggtgataccttacttggtggggatgacaagtgtggtgtgtcagaattaatgacttttgcggaatatttaatgaatcatccagaaattaagcatggtaagattcgattggcctttactcccgatgaagaaattggtactggtgctgaacactttgatgttgaagactttggtgctgactttgcttttactgttgatggtgaagctcctggtaagttagattggggtacattctctgcggcacaatttagtcttgatattcagggagttaatgttcacccagctgttgctaaggggcaaatgattaatgcaattcaagttggaattgactttcataatcaactgccagaacacgatcgcccagaacataccgatggacgcgaaggtttcttccatctaatgaattttgctggtactgttgataatgctcacttagattacattattcgtgattttgaacgtgatgggcttgaagagcggaagaatttggttaagtcaatcgttaagaaaatgaatgatgaattcggtactgaacgaattacacttaaaatgtgggaccaatattacaacatggccgatgaattaaagaaacatatggacatcgttgacttagcgcgcgatgcttataaagcagaaggtcttgaagtcaatgaagacccggttcgtggtggtacagatggctcacaattgacttatatgggcttaccatgtcctaatatttttgccggagaagaaaacatgcatggtcgttatgaatacacagttcttgagtctatgtggaaagctgttgacgtgatgatcaaaatggctgaattaaatgctgaaagagctaagtaagtgaaacatttttgactaaaaatatcaataattctatttctgatctaatatgagattattgatagattaggaaatagggtaaacatagttaataaataaaaattatgcactaatactattaaaaataaaagatagtttataattaccgtcattataggattatagactatctttttgttgtacttttaacttttatgaacttgtgaaacaaagtgattaaacttagcccttgcaaaaagtgactaaagtaagtattatagttagtgtaatagattaataatacagtacaaaataggagctgagtaaatggaatttaaagataatattcctatttatcttcagattgaacaatacttgtatcgtcaaattgctttaggcaagttaacagctggtgagaagattccttctgttagaaaacttgctctagaattaaccgttaatgttaataccgtgcaaagagcactacaacagatgaacagtcaaggtattctttatactaaacgtggcgaaggtaattttgttactgaagatactaaactattatccgaaaccaagcagtcattaattaataatgaattagaacagtttgttcaaaatatggaagagtttggaataggaaagaacgagttagtttcaacgttagagaattatttaaaaaatggtggggatcagaatgaatgatttattagctattaaagatgtaagttataagaaaaatcagaagcaagtattgcaagatgtgaacttgaatttagctcctggcaagattgttgcgttacttggtgaaaatggtgctggtaagaccactttgatgcgaattattgccggtgtagctaagaattacaaaggcgaaattaatttagagggggcaacaaaagaggcagaaagaaaggctaagttgtcttttactgatggtttaactggcttcagcgattcaacaaagatcaaggaagtggttaaattttacgcaacgatttttcaagattttgatgagaatgaattcgatgagctgcgtaagtttatgaaattagatcctgaaatgaagttgagtcagttatcacgaggaatgcgtgaaaaattgattattgctttaacatttgctcgtaaagcagatttgtatttacttgatgaaccttttggtgggattgatgcaatggctcgaaagaaaattattaattccatcattttgtggaaagatgaaaaggcaacgattttaatctcagatcactttgtcaatgaaatttcatcattgcttgatgaagtggttattgtaaaagatcataccgttttggaacacaagtcagcagatgacattcgtcaaacgcataagtcaatcgaagaatactatgaaagtttttatgcagatgaggatgatgaataatgactagttttaacacattgtttaatcgaatgtttcaagaaaaaagcaagtcagtctatttaatcttcttaattcaagcctttgctagtttatgttttacaattattggttttgtttcggaaaatggtacaccagaatttgttaatggaaaagatactagttctgtcaatgtgattgttgcttttctcgctgtatttgcagtaatgatgctgataacgtcatttatcgctgattttgtttattggattatttcttcaatcaagaatgaaaaaattaatcgcagtcaaacttggcgcttgattccggtaactgatactaagtttttgcttagcaattttgggacagcatttttaacttatatttggttaggaattttagaagcggtcacgataatcgttacccttttgccgatgttgtctgatcaagatgtgcgcaaagcaataggtcaggctagcatccatctttcagcaagagactggcaaacaatgctcggaagtttgctgctaatcatttttattggctatgcttggtacgcaattgtaagtttgcttaacctagcaagccgcagcattattgattttttgccaggtggctcaagtaaagtatggacctttattattagagtaattgtaattattgcgattatttggattttaggccatgcggcaacaattatcttttcagtcttaggaaagtttagtccttttatggtcaacagccaggatattaactatgccactacgattcttcaattcttggtctttgatgttgtgattactttgatcgatatcttgcttttgaataaattcgtagaagcaaaacagaattaggagttttttatggcaaattttaagaccttgtttaagcaaatgtttgtgcaaaaaaggcgctacgctaacttagttttgttattacaagtttttgcagtcctttttttgctggtaatggctctgttagataaaagcaatttagcttatctcaacattagtaaggacagtaattggctagatcgtttgcttagtgcaggaatgctcgaaacgccgattgccgatgtgatttttgttggtctgctttgctggcaaaatgaaaaaatcaacctcagtcaaacttggcagctagctccagcttcaagtgtcaaaatctggctgattaatatgctttctagtttagttgaatgtatttatatttttgtaattcaagtcattttaggcttcgttgctgctatgattgataatttaagtcatcattattcactgcttcatgacttagttgatgctaaagttacttgggcagatgctagtttattaattgaatttctattgttcttaactggaacggttttagttattatgacttttgtcagttttgctaattttttgacgaaagtaattgttgatcaattgccagttaacaataatattgtcattaagttatttgtgatggcagtgattgtgattattgcaatcttgattgctgaacagctaaacgaacaaattactgctatgtatttgcatcgttttgccaaagaagcagcatatgatccattgggtatttcagtggttgagtactttgcaggagcaattgttttaggagcaatcgacagctacttaatgagtaaatttgtcgaacctaagataattaatcgttaattgaaggggaggggtagatagtgacgaatttttggaccttgtttaggcaaatgtggacgcaaaaaagaaaatttatttatttggttttcttaattaatatctttgctgtagtatttttatcaggttattttcttcttttcaaaaattggaatggtctagcaaatctgccgtctaaaaatttagggcaattctggcgcaataattttgtctatgtgactttatacattgattttgccttttgtgcgattacatgttggcaaaatgaaaaaattaatctgagtcaaacctggcatttagcagctagcgatgaacgaaaaacatacttagctaatatatttagcagtttgctggcatgtggttatttcttcttgctgcaagaaatcgttaatagtctgttgctgatccctagttgcggggcagacagttttgctcaagcatttcgtgagtttggtctgtatccaattaaaacagttcccggcgttgaaataactagcaatcgaatgcttgcttttcattggttgtttatcattttgataattttaatcatttacttctttgtcagctttgccaattttagttcgcgagtaattactgatttcttgccgtttaagagtacagtttgggctcgcttgttaattatcgcaattttggtaattgtcgcagcttactgcggcatgatctttatgtctaagttacagggctttgttgataagagtccaaatttacaagcaaccgatccaatctggttagatgatttatgcttgtttattgttagccttgttttcggtattttgaatctagtattcgtgaagaaatatcttgaaccaaaaatagattaattaatgcaaaaaaagagcttcatttcaatcaagaaatgaagctcttttttgtagttaactaagcatttgctgacatgtaatcataaagctgatttacttcttcggctgtgaattgtccatcgccaactttcatggcgtgaactttttcaactgagaggtgactagcaaaggctaggtcagtgtcattaacatggtgttttacttgaaaattgataattgcatcagataattcttcttgctcattcataataatttctccttaccctctaattttaatcaaattggaataaaaaataaaattttttgcaatttcattgattaaaatgttttccattgcgtaaatggccaatacctgaagacgactcggccaactaatgcgctgcgcttaacaaaaccgaagtaacgtgaatctttggaaacatcgcggtgatctcccatgacgaagtaactatccttaggtactcgcttttttaaagtgaaattgttagtatagagttcacctaatttatgtgactttctttggtagccattatttaaatatggttctgcaatttgtttgccgttaatgtaaagcttatcatttttagaagtaaccatatcaccaggtgtaccaataattcgcttgatatacagagcacctttttggtctggtgcttttagaatgacgatatcatttcgtttaggcgtaaaatgacgtacagcaatcaaacgatcgccattctcaaatgtgggctgcattgatggaccagatactgtttcatttgataggaaaaaactaaaaataaagtagtaaattcccatcaaaattgcaaacataataattatgtctaaaacaaagcggccaatgctttcatcatcatttctctttttggtttcaaccatagaatatctcctttgcttgctagtcttattataactgaattctccgccgttgaatggtaaaatcatattaaggtgtttaagtatgacaaaatttttgacgaaattaacaaaattagagcaagagataaatcatactgcggttaaacgacaagttgaagaaatagcattaattgatagttatgtacaagcaggtaagccattgaagcgggcaccacgcagattaggtttattgccagatgaatttgaagaagttttagttgaggtgggaccagataaagaaggggccttaagggatttaaataatttacttaataattttcggcaatatctctctttaatatatggcatctggtctctgcctaatattcagactgcgcagttaattaaaaataagctgcatgtacaaacagcgttagaaatcatggcaggcaacgcgtattggtctcaagctttgactcaggttggaattaaagttcacagtacagactcattagagtgggccaagacgtcgaccactggagctaagcctttttatccagtagaagatttaccagctgaccaagcaattaagaagtatcacacagttaatctagttctatgttcgtggtcaccaaatttcggtcacggagatttagaaactgtggcagcttggcataagtataatccaagttgtcatttgctctttgttggtgaaaaagatggtgctactaattcaccagaattttggcaccaaaattggtttaaaaatagtgcagctttagacgagattaatcattccttgcaaagcttcgattttattaatgaacaggtatttgaaataaaaaatgaattttaaaaagatatttttgttactgattcttttattatcttttttaggaattggaacaatgctctccaatattgaatctaattatgctgacgaattgctggaagcacacggcttaactaataatacccgctattttagaacagatagtgatgataagattagtactttcctaaaatatttggacaaaaattatgcgaatcatcaaattcaactgcatctagataataattatgaaaaaaaacaagtgcttgtttgggctaatcatgccgttactggcttgccaactgagagtggtcgctatttttcgcctgatgattttaaaggacaggtttcttttgtggtgctggggccaacagttaaacttaatttattagatgtgcagaataataaatatgttattttaggcaaaaattattattctgttataggcgaatttaaggactatccacaggtagaaatggataaatattatctaagtacaggaattgatcagccaactgctaaagaccagctcaagaattatcgaattgtagtagatgcaacacctgcagtgattgaaaagattgctaagcattatcatgctagtttgcatattccgtcttttgttcaagagcatcatcgagatcgtttatctgtcgtgccggatattttaatgttagttgtttgcctattggtcggaatgatcacaaatatgttgcttgcaataggaattaagcgtcaggctcgtttaacacgtctacacgatgatttgctgcgcaattgggtaattaaccgcagcgtacgtttatttttaatagaggctatttttgcccttgctacatacttctttttaagatggcatgccttttattcaacatatggttctttaatagttacattaatagcttcctgggttgtaattgtattggcgttttgtgggatggtctattacttagtgagaaaggacaggaaaattgctaaatctaccaaatgaatttaaaactaaatatgaaaaattattaggtaccaaaaaagcacaagaactatttgcggcgatgaatgaagagagcaaaaaagcttttagaattaatacattgaagcctactaaggtttcatatgagcttactgattcagtaccgcaaataaattcagcctattatggtgaagtatcgggggaagatcctgagtgggtaagcggtagtgtttattctcaagatccagcggctatgtttcctgcggcaattagtggtgttcggccaggagagcgcgtgctagatctgtgtgctgcgcctggaggaaaaataacagcattaggagaacaattgaagggtgagggccttttagtagctaatgaaatctctgcaacacgagtaaaggcactacgggaaaatattgaacgttggggcatcagtaatgccttaattactaatgaaagtccagaaaagttagttccaattttttcggaattttttgatgtgattttagtcgatgctccatgtagtggtgaaggaatgtttagaaaaaatccggaggcaattgattattggtctcaagactatgttttaacatgccagaaccgtcaaaaagagatcctcaatgaagctgttaagatgcttcaacctggcggacgcttaatttattcaacttgtacctttgcaccagaagaggatgagcagattgttagctggttaaataaagaatatggttttacaattttagatacagggatacaaactaataagattgatgttggacagcctgagtgggctgatgggaatcctgatttgactaaaacattacgcttttggcctcaagatggtataggtgaaggacaatttgtggcagttttacaaaaagtaggtaaagctagaattgaaaaaaagagcaaaaacaaaaaagccaagcgttatccgtggcgcttaaccaaaaatgatcaggaactagttggtcaggtaatggatcagtttaatttaccagttgctttaagtgactggcgtaataaagcaaaagtccgtaatgaacatgtctatattcctgcaatcagtttgcctgaaaaaagtaagcttcatgtaattaataatggagtcgagttgggtatattaaagaaaaaacgttttgaaccaggacatcaattggcagaagtgctaggtaaggtaaagcaagaacgggtttatgatttaccgacaattgaagaataccaaaattatttgcacggtgaaaccgttaaagtggacagtgatttgcggggctttgtgttagtcagctatcaaaaattaatatttagttttggcaaaatcgctggtaatcaagtattgaagaacttttacccaaagggattgagaaaatgataaaactaattgcgacagatatggacggaacctggttaactgaccagaaagactatgataaagaattatttttgcgtgaatttgcggaaatgcaaaagcaggggattaaatttgtagttgctagtggcaatcaatatgctaacttaatgactcgttttcctgaggttttggataaaatttattttgtagctgaaaatggggcattagttgctcaaggaagacaaattttgcatgttgactcgttaaggatgacatatatcaaactttattaaaaataactactgaatatccatatccagctgtagtgatggggctagtaagtgcttatgttaaaaagagcagtggacgagcttataaacaagaaatgaaaaaatacatggagcatattactgtagtagattcttttggagaaattgatgatcagattttcaaggtcagtctgacagtgccagaagataaaatgtctaaaattttgcgcgaattaaaagaaaaatatccggaggttggttttgtttctggtgcagcagactcgattgatatgcaaactaagggaatgaataaggcagtaggtctagcatatttgagtcaaaaattagggatcaaatcaagtgagatgatagcttttggcgatagcggtaatgatgtaggaatgctgaaatatgtaggccgtagttttgctactgcaacggcgttgccagaagccaaacaagctgcagggcaaattattggttcaagtaatgaaagtgctgttcaaaaagaaattgctaaattgcttgaaattaaataaggaaaattatgtaaagtaaaagcactagtaatcattaactagtgcttttactttacagtaactgatcgatttgagcctttaatggtaaattatagtatttttttatttgtaccagggatgctaaatcttttttgccgtaaacagcaattaaagcagccaattcatttttccaattagtaattaattgctctaatccagtactaccattttggatgtattcttgtaaaaaaacatttgaaataccaacaaattttcctcctagagctaaaccttttaaaatatctaggggattacgtactccaccagaaacataaaatttaacttgctcttgccatgccatcagagcagtcaccacagtaggtaaacctaaatcttctaagtatgaaacgtcactggcattacgtgcattctcaatctgggcaaagtttgtgccacccgaaccggcgacatcgaagtattcaatgccatttacttttaaaagatgaatacttgtttgatccaatccaaaaccgacttctttaataataatgggcaaatcgatagcggtacgaattgctttaattgaatcaagccaacgaaagtcacgatcaccttcaggcatggcaatttcttgtattgtatttaaatggatctgaagcgcatctgcatttaattcttggataatttgtttaattgcagagattggtgtttctggattaacattaacaattagtacaccatctggatcttctgctctggcaaccataaaactgtctagttgatcagtttccttagctaaaatgctggcagatcccaaagctagggcaatattttgctgctgggcaacctgtcccaatgcttgattaatttgtttagaagcagctgagccaccagtcatagcattgataaaaaaaggcgcagaaacatttttgccaaacatttctgatcccagaatagttggatcgacttttgtttcaggcagagcagggcgcaacaaatgcagttgatcaaaactattatatttttctttattaaaaaacatctgagctaacttcagatgttcttcttttctttcagatctaatcgacatagaactctccatcaatgagccatgataatctggtgaaccttaaaattaagaggcataattccattatggcgccattcgctttcaagtgcttcaacatcggtattagcatctgtaatcacaatgccacagtcaccattaccagcaccagaagttttagcagctccaccaaaattttctgcaattttgattaattgcgataaacgtggaatttcaatggcaatttggttaattttggcaaagtgctgcaacaatttacggttagcccgaatttgttgtttgattaaagcaatattgtttgcttcgaaaccttgaaccatctttaaaacacaagctctagaagctgctaagaaatttttatattccatattcaaagccgccttattagcgttagtttcatcaacgaggcgtgaagttgatgctggcttttgactccaaccaatcatcagtttcatatctttaggaggagttagtaattcaacttttaagccaggccaagcttcattaacgacttgaactaaagtcttattagctaattcttgctttaaccattttttgtcaaaagtttggtaagctaaccagccgccatagacactagctgcaatgtcaccagctgagccatttccttgaactgaatagtgtgaaatagccgataatttataaaccagttcattgctcatttttacgccataaaaacgcaagatagctttaactgtagctactgtgacggctgcacttgaacctaaaccatattttttaccatctgcagaatctaagtctgaattgacgtgtaaatcatagactttcatcttgatattttgctcaatacaatattgttcagtaaatgaaatagctgacaaaatatattcaaaagggttgtcacgattatcgattaccatttttgagccctgacgaacccaatgaatcgaatcctgtgagtattgcttggagtgaattaagccagttgcccctttactcttagtgattgacacacgtacaaattggttaactgctactaaaatagcaggacaatcttgctctaatactgcatattctccggcaatatataactttccgggcgctttttctgttatcaaaagaactaaatcctcgaatctaattaacttttttaattacaactagtccaaataagtaattccaggaccaaaacttgcattcactatattaacattattaaattcggacgaaaagcgttgaatgatatctttgctatttcttaattggcaaagtaccttaatatttggtcctgcatcaattgtatagtaacattcaattccttcagtacgaagttgttcaactaatttaatagcttgaatggtttgcggctcaaagtaagtgaattcaggctgtgcagttaaattaattgcatgcatttcatttgcatttaactcagctaactggcctagggcagtgaaatcattactttttatagctttgatcatttcatttaattctgaattgttgcgttcaagccagggcctgaaaaatggagaagattgggcatctttcataccataagtcgaagaaatctttttttgtttggtatttaattcaactgctaaaaggtgaagatccatcgttggtgtttcatctagtgcatatgcgtaagatgtttcgtcgctattacctttttgccaaacagcaaaaccgccataaacggagcggctggcagaaccagatccaatcctggctaaacgagataaatcttctagatcaatgttgatgtcatagcattgacaaaaagcagcagctagtgccgcaaaagcagaactagatgatgctaatcctgcagaagtagggacgtgattgacagatttaacgattaaattgccagtgacgtgaaaacgagcctgcaatttttttagataagcaaaaacacgttgactagctgcagcagtttgctgttgattatttaagaaaaattgattttcaccatctgttttttcaacgctagtatcagtataaaaagcatctaaagtcattgataaactagacattaaaggaagacgtaatttgtcgtcagctttgccccagtacttgattaaagcaatgtttgtatgtgctcgtgcggttctattcattaaatctcctcaatccagtagtcactaattaaatctttacatttagaggcaatttcttgggcgacagtttcgttatcgcacaaggaaatagtaatgccgccaagacctccgcctgataatttaaagcctaaagcgttatttgacaaggcaattttttgcagttggtcaattttatttgttgaaagatcaaatgagtgcaaaatttcttgtgcttcattaaaaatctgtccaactgcttgacgatcgtgcttgatccaagcttttttagtaagatccgctaattcacccaagcgagctatttttttcttggcatagtcggacttttcaagcatttttttaactaaaaaaacagcttcctttgtattgcctagttgaccagtatccatgattaacagggtagctcctaatttggtttgtaatattttaggccccatttttttattaaaaaaaactagataatctgaattaacagtggctgcatcaagaccagaagctttaccatgattgatcatttcagcatgattagttacagtcataatttctttttcagtcatattcagctgaaagaattggttcattgccctagtggtacctaatgcaacagtagcacttgaaccaaaaccatgttccattggaatttcaccagtgtatgtaattttaagtggatggttattgccagcctttttttgcatatgtttaactacgtattttaggccatcatattctgccggtgcttcaaataatggaccgtggtagcgagcggtatccatccacatttgagaagcagattcaacagtagttttaatgtgtaaagccttaattggcatagctaaagcatcatatccataaactactgaatgctccccaataataattaccttgccatgagctaaatagctgcttttcatttttaatcatccttaaactagatttatacaaaagattgcccttgctatgataaaataaaaagcaaggagtgcgaacaaatgatcaaaattcttacaggacgacaaaccgacccattacaagaaaaaattctggaagaagcagttgaaaactatcagcaacacccagaacaagaaacttttatcatcgttcctaatcatattaagtttaccacagaagttagggcaattaacaaattagcaacaagcaaacaacaaactgagactgcagttaaaaatttgcatgttttgtctttttcgcgtttagcttggtttttcttaaaagatgccgagcaaggattgcctaatcaactagatgatgcagctagtgcaatgctcttagctcatattattgagaacaaaaaagatgaattgactatttttgaaaatgttaatgttaattctggattagtaaatcagctttatcagacaattttgcaagtctatgacggaaatttagatttagacgagatatcagaggataatttagatcaagaaactaaaaataaattacatgatttgcggattatctatgatgcctttattaaagaaattgcgggtaaattctctactaagaatgaggttcagctgcaactaaatgaaattttagctaaaagtaaaaatttaaagcaagccagtttttatttctgtgatttttcacatttttcattacaggaaacactaacgattaaaattttgatgcgtaaagcaaaagatgtaatccttgcatttaaaacgcgcttaggtgaaattaattctagtgcggaagaaggagattatgattatgtaatccagcaaactattaagcgcttaacgctgttcttacaagagagaaagatggactacgtgacagcaacttttccgcttaattcgcaatcaaatggtcgtgaaatattaaatagtctttggacggagacaattcctaaagttgacgaattgaagcaggtacaattagttaaagcagactctcgatatgcagaggcttattttgtagcgcggactatttatcaacaggtagcactaagcaactatcgctatcatgattttttgattttagctccaaatttaaaggaatacgagacttatttgacgccaattttacgtcaaaatcagattccattttttaatgatttacaacaggaaatgaagtatcatcctctggttgttttaattgaaagcttatttaacttacatgagaatccgtttcaaacacaaaatatgctagccatcctaaagacacacttgttaataccttcttggtataaggaagaggcggagtatattcatgatgttgatgaactagagaattttgttctggctcatggtattaatcataatttatggaaaaaacactttgataattttgtgaatgctgaagtgatccgcttagacaaaatggatgatgaagtagctaagatcgatcgtttgcgcagctacttggttgataagatttcaacatttttcaaaataatagagcaagaaaaagatagtcaaaaggcgttaacgatattttttgagttcttaactaagaacggaattgccgaccgattagaaaaatggcgtgatgaggccaatgaagccggtgatttacagcaggcgcagcaaccagagcaattatgggatttattaatgcagctgttgcaagactatttagcaattaatcctgaaacttttgatttaaatgaattctttaatatgttaattagcgctttccgagaagcaaatttttcccaaattccttcaacacttgatgcggtaaacctttctgaaatggggatggtacaaactagcggctataagcaagtgtttatcattggcgctactgctaataatttaccccaaattcagaaaatgccaggttttttaactactgaaaacttgaatcagctacaaaatagttttaattcagaatcttacttagaagatagtcaacagcttaataacttagaccaaaattatcagtttggtttgtcgctagctttagcacaagatagggtatatgtatcttatccagtacttaatgcttcaaatgaagagcttgatccttcaatttattatcaacgtttaaaggattatggtgctcagcaatttgttcaacatgatttgccagaaaagatgcaggatcttttgtctttcattactaaccctgatgcaagtttaggctatttaacctatatgaattcaataaattcaggtcttgctgtgcaagagttattaaaaatcacacaggagcaactacctcaaaaaacgaagacagtgcttgaagcaagtgattttgataaccagccagaaaatattggtcaggacttggctagtcaattgtatggtcaaaacttgaattcatctgtgtcacaactggaaactttttatgaaaattcatatgaatatttcttgaattatgggcttaagctgcggcgacggtttgaaaatgaatttgatgttattcaggctggaaactattttcacgagacttttgaccgtttagtgaaaaaactaaacaagcagcataccgacttagcagatttaagcagcatagaactggaacaaatgcttaattcggtgcgaaatgtgatgaaggatgaaggaaaatattctcaattaatgaatgatccttttaatcaatatcttttcaagtgtctagaccatactacttctaaggtagctcataattggcggcgctccttgaaggaaaccccgttacgggctaagtattctgaattaagttttgggttaggtgaaaaaatcaaaggattaagcttaaaagtgccagatatatcaggtcaacataaagttgatttgcgcggtaaaatggaccgggttgatttggccaatttcaatgataaggatcaagttttagcccaggttattgattacaagtcatcagctaaaaaatttgatcttgggatgttttataacggaattgctttacagatggtttcttatttggatgttttgactaaaaatgatcaattttttgctggaaaagatcgtctttcattattgggtgctttttatcaaactgttactagacaattagaacgtttgaatagcaataaactaattgatagtagtttaaatttgaaaaagggagcaactgatagtaagcccaagctgatgtatactggcttaatcagcaatgatccagaaatcttagtagaagctgagccattacttgatgatcatcctagctattcttctgaactgtatactggggttaaaactaaggctagaggtggctttagcttgccacgtgaccgcaactttagtgaggaagaaattgaattactgctagaatacgatgagtatcttattcgacaagcatcaagccaaattttatctggaaaaattgaacttaatccatatcgttatggcaaagcgaagaatgccttaacttattctgattatcgtgatgtcttcttttttgatgcgatgctgcgtcaaaatcaatatcatgaaataaacaatctgaataaaaaagaattaattcttaaaatcaaagagaaattaggaaaggaacaataaaattgtctcaatttactaaagagcaacaacaagcaattgatgatcgtggtcatgatattctggtttctgcttctgcgggtagtggtaagacaactgttcttgttgagcgcgttttaagggagattctttcgggaacccaagttgatgaattattagtaattacatttaccaaagcagcagctgaagaaatgaaaactagaattaaacaggcattatcagctgaattagcaaagccgggatctaatcgcagatatttacgtgagcagctaaatcaagtggatactgctaatatttctacaattgatgcattttgtctagaagtaatccatcgcttttattactctgtaaacttagatccaagttttagtattctaactgatgatactcaagctgcattgttaaaagaacgtgcattacgtgaaattgaaggggagtttctagaaaagaaagacgtaaattttaggcatttttatgataactttgcaggggatagagatgcggatagtccgcgcgacttgttgctggatttgtatgattttgccatggccaaacctgagtatcgctcatggttaaaaaaattggttgatgtttacgtggttaatggcagtatcgtggaatctgatttgtggcaaaaacagattaagccatacttgcttactagtattggcgacttacaagggaaaattaatgattatttagaaaatccagtaatagaaacaaaagagctagctaaggctaaggaagcttttaccttgtttgcacaaaatttagatcattttgtttttgctttagaaaatgatgcagactacgataaacaacgaaaactattacgttcgtgtgtttttacagcgaattatcgtaagtcaagtaaatgggatgaagatgttctaaatttttatgaagacctacaaaagttaaaagatgaagcaaaaaatttggtttttgatacttttacttcattttttgctgttgatgaacaagaacaaattaaagtcatgcagcgcggccaaaagattgttgctgcaattgctaaatccgagctagccttgattgatcggtttaataagctgaagcgcagtgaaaatttgcttgactatagtgatatggaacaattggcttatcagattttgagtcaagatacatcgaattctcaaatggctcgtgaattttatcaaaataaattcaaagagattttgattgatgaatatcaggatattaatgctttgcaagaaaatatcatccagcaaatcaaaaataaagataaaaatacgcttttcatggttggtgatgtaaagcagtcgatctatggctttagacaagcagagccaagcttatttttgaaaaaataccatgattttgccaatgatgataataaacaaaccaaaagaattctgttgtcagataatttccgctctactgagccggttaccaaaattgtaaatcaagtatttaaaagtgtgctaagttcagattttggcgggattgactatcaaaaagaaggacaattaatttttggtgctaagtattatcctgaaaacactcctaaagctagtgaagtaattgttcatgaaaagaaaaatagcagtaatgaagatgaaaatgagatagatttttctgaaattcaaatggttttagcacgtattaagcaactaaaagaagagcgtgtacaaatctttgatagtaaaacaggaatgagagagttacgttacagtgatattgctatcttgactagaagtcgtagtgataatttggaaataatgcaggaatttgctaagcaggatataccattatttgtaactgatgcgaagaattattttcaaacttttgaattgactgttatgatgaactacttaaagatcattgataatcccgatcaggatattccattagtttcagttttacgttcgcctttgtttaattttggtgaaaaggatttagctaaaattcgtatcaagagtaagaactctactttctatagtgcattgacttcttatgtaggtgtaggagatgaattaagtactcgaatcaaagattttttaaatcaactagctgatttgcgcaagtttgccacggcacatcgtatttctgaattgatttggagcatttatgctaggacaaatttattagagataatgaccgcactacctaatggtgaacagcgacgagttaatctagaagctttatatgaacgtgctgcttcatatgagagtgcagggttcaagggattataccaatttatcaattttattaatcggatgcggcaaagtcagaaggacttggcacagcctttattaactaaagaagctggtaatgcggtcagattaatgactattcatggttctaagggactagaatttccgatcgtgttttatgtggggatgcagcataaatatcaaatgcgtgatttaaaaggtaactatgtgattagctcagatagtataggaattacgctccgtgaagaacattatcggattgactctttagttaaagcgatgggaaatgtaactaaaaaaaggcaattattagaagaagaagcgcgaattctttatgtagcattaacgcgggctaagcagaaattaattttggttggcgatgttcctaatctggataaacgagttaaagaatggtcgactgaactaaatcagattggtcaattatcattagcagataagttatcttccactagtccattgagttttatgggacctgcgttggctttagatcgacacctagctgtgaaaatgtctgatattactaattcgttggataagagtcagtcgtttttatatattaattatgaaaatgctaacggtgaactacctgattatcagaaagcggagacaagtaatgataaaacgcaaagtaaccttttaaatcaaaccactaaacggctttatcaatttaattatccgtttaaagatgctagtgaaactacagcttaccaagcggtatctgaaataaaaaaagcattcaacgatccgatcgagaccgaattagagaatgcccacttattgacatcgactaatcgttatttacaaccgattgatactaaacctaatttcttgtatcaaactaagtttactggtgcagaaatcggaactgctacacacatgattttgcagtattatgattatcaaggcaatggtgctgaagatcaactagaagtagaaattcaagaattgattaagcaaaagaaactgaatccagaaattgtttctagtttaaagaaagaccaaattgagtggtttgttcatagcaattttgccgaggaattttggcaaaagccagagaatttaaagcgagaaatagatttttctagtttaatctccgctaaaactttgtttaaaaacttttcagatcctaatgccaaaattttggttcatggtacaattgatggctattttgtcaaaaatgatggtattattttgtttgactacaaaactgaccacgttgatcaatcgcatttatctgaatcaattgaattgattaaagaaaaatatacaggtcagcttagactatatgaacaagctatcaatgaatttagtcaaaaaaaagttattggaaaatatttaattctgcttgatgctaaacaagcggttgaagtgaaatagaggaaggaggaaattatggcaaaaagttttactaaagatacatttgctgtagttgatctagagactacaggaacgcaacgtgagaatgggcatcatattattcagtttgggtgtgctattattaaaaatctcaaggtagttaaaacttattcatttttgatcaatccgcatcgtgaaataccacaatcagttgttaatttaaccggaattcatgatcaagatgtagcaaaacaaagagattttgattattatgcacccaaaattactaaaattttgcaaaatactgttttcgtagctcataatgttgactttgatttgccttttttgaattatgaactagtgcaacatggttatgaggcacttacaaataaagcaattgatactgtagaactggctaagattgcttttccgacttttccatcttataagttgagtgatttgacaacacaattggggattaaacatttagatccacataaggcagattctgatgcttatgggactgcagttttattgcttgaaatttttaataaattagaaagtctacctcaagctacactgaataccctcagttcattatctcatgggcttattcgggatacctcttgggtgattacaacgattgcagataatttacgtcaagaaaaacggcctttaggtaaagaatatatgcaagtgcgtaatattattctgcaaaaacaaaatgataattctgaagcacatggtgggaatgctaaattcccaaagactgactcagagaaacaaaagctatttaaagatcatttacactttcgtagagctcaagtcgacctaattaatcatttgcatcagtttattaatgatccagataaaagggcgatgctaattgaagcacctaacgggactgggaaaactttttcttatctttttgcttatgcttatcagctttattctggtagaaaattagttgtagctacaccaactaaagtgttgcaagaacaagtgattgaacatgaaattccgcagttatttaaggtgattaagttggatttgactgcagaagtagttaagtcaagtagtcgttaccttgaccttgacggatttgtacagacgatttttcaaggtacaccgaataagcaaaccttgatattacagatgcagatactggtttggctgactaagactaaaactggtgatttagatgaattaaatttaactaactataatgcaccactctttgcacagattcaacatccaggggatgcaagagtaggtagccgttttgcaggggtcgatttttggaatttagcgcgtaaacgacaagaagaagcggatatattggtgactaatcatgcttatttggctaaccactatatggatacaatttggggtcagaatccgtatttagtcattgatgaagctcatcgtttcacagacaatgtcgtaagttcgcgtaatgattctttgcgttttgaagctttgtggggagttttaagtcatctccgtaatttgctttatttctcagatgaaagtgttgaagcgcaatttaatgatgatgtgcagctgaaccttttactaaagaaaatagatcctaaaattttggaattaattcagttaattaatgaattacaaaagcaactttattttcaaagagataatgctgttaatcggacagttttagctaatggtaatctagaacttagttttcaaggaaaaagtttatttggcggaaatagcaagtttaaagcgattttacctaagttccaacaaaaattagaagaggttagggacttaactaatcaggttttatttgaattatataatgaacaagaacgcatgctggctaatgttgaggtattagtcaatgagattacggaacaaattgatcgcctagattattactctgaaaagggctatcaattggctgatttgctttctgatcaaaaaggtttagagcaagatggctttattttgatgattactaatcttgatgatccactaagtaccaatttagactggttaatgcttgatgctggtgaagtattaaaacaaatctatagtcgttttgaccatattgccttcgtcagtgctactttaaccagtaatcgaaattttgaatatgcaatcaaccagttagctttaacagaattacatccggttgaatatattggtaaaagtacttttaatataaaaaagcatttacaggtactggcagttaataatatgcctagccctgatagtgaagaatttgaaaagactattgcacaaattttacttagtgacattcaagataagcaccatgtacttgttttgatgactaatttagaaaaaattaaaactgtttttaccatgattatgaatgagccacagctaaaagattttgaaatcttagcccagggattgtctggttccaataaccgaattgctaagaggtttgtaattgctaaaaagtcaattataattggtgctgatagtttttgggagggaattgattttcatgattgtgggattgatactgtttttgcggcaaaaatcccgtttgaatctcctgatcaacctgaagttcgtttaaggcagaagaaattggaagatcagggaatcgattcttttactaaagatagtttaccaagagctgtcattcgttttagacaaggaatgggccgtttaattagaggagaacaggatcatggtcaatttgtaattttagacccaagattatggactaaagattatggtcaagagttccttcaaacgattcctgtcaaagttgaaaaggttactagagaagaattaaaaaagaaattagaaaataaataattatgttacaagatgatacaagacaaacaatcaagtttgtgagttgggtaattggtttgataatagttgcctttctagccagcattgctatcttttattatgctggatctagaagtcggggcaatgatcaaaaagttacgcaattggctactagtaaaacaccaattagaaagattcaaaactattatcatttagatcgcggcactagcagctatgctatagcaggcaccaataataagggaaaacaatattactttatttatttgccaaattctaaaaaggcatatctatatcctgcggccaaaggaatcactgaatctaagattaaaaataagtttaaatctatccatacggatgctacaataaataatattaatcttggttggtataagggtgaggtcgtttgggaagtggcctacaaaaaacaaaacggcaatctaggttatactttatatgaattcaaaaatggaaatgatatctcagaagtcgataatttatagaaactttggtattatggaaactgtataattgatgaaaaggtggataggattttatgacagaattgatttcaattaaagattcttctaaacatgttgatgaagaagtcaagatgcatgtttggttaacagataaacgatcaagcggaaagattatctttttgcaattacgtgatggtactgcatttttccaaggggtagtacgtaagaatgatgtatcagaagaagtatttgatgctgctaagtcacttagacaagaagcaagtttttacattactggtactgttcatgaagacgcacgttcacactttggttatgaaattcaaatcactgatttaaaagtggtttcaaacaatgaaggttacccaattggtaataaggaacatggtgttgacttcttacttgatcaccgccacttatggttaagatcaaagaaaccatttgctattatgcaaattagaaataccatgtttaaggctactgtagatttctttgaaaaagaaggctttatcaaatttgatgcacctatctttatgcattcagctccagaaggtactactcaattattccatgtagaatactttgaccacgatgcatatctttcacaatcaggtcaattgtatggtgaagccggtgctatggcttatggtaagatctttacttttggtccaacttttagagcagaagaatcaaagggtcgtcgtcacatgactgaattctggatgatggaaccagaaatggcttggatgcatcaagatgaatcgttagatattcaagaaagatatcttgcctacatggtgaagcaagttctagaaaataatgaatatgaacttaagattcttggtagagatcctgaaaaacttcgcccaactactgaaggtaacttcgttcgtcttccatacgatgatgcaattaaaatgcttcaagatgctggacgtgatattaagtggggcgatgactttggtgctccagatgaaggctatatttcagaacaatatgatcgtccagtcttcattgtcaactatccaacctcaattaagccattctatatgaagaagaatcctgataatcctaaggaatacttatgtgctgatgtaattgcaccagaaggttatggtgaaatttttggtggctcagaacgtgaaggaaattacgaaatccttaagcaacaaattcttgacgctggtttgaatttagaagactaccaatggtaccttgacttacgtaaatttggtggagttcctcactcaggtttcggtatgggctttgaacgtactattgcttgggtttgtcaccttgaccacattcgtgaagcaattccattcccaagattgattaacagaatgcaaccttaatttggttaataattaaatattgatacacaaagttggactagttattagttcaacttttgtttttgaaaggaaattattttggaatttaatgattatcgggcattaggctttacaaccttacaaaatggattgatcgcttactaccctcaattaggcattagtgatgctgaactaattttgataatccaattggaagcatttagccaacgaggtgagagttttccatctaatgaaaagattgctgctaatactaatttatcggttagtgatgtgggtaatcttattcagcggctaattgaacgaaattatttaactattgaacaaatgactgatagtcaggataaaattggtaataaatatagtctcaataagttgtataatgcacttgatcactatattgatcaaaacgtcttgatcaaagataagaaaaaagataaaactgtttcagttgctaataatttagaaaataatccgttaaattatttgtcacgaaaagtagaagttgaatttggtcgctatctgagtccaattgaacgagaagagattgcgcaatggttaagtgtggatcactatgctcctgaattaattgaacttgctttgcgagaggctgtattgtctcaggcatattctttaaagtatattgatcgtgttttacttaattggcaaaggcatagtctgaaaacaactgatgaagttgagagatttttgaaaaggaatcgataaaaatgacagaagatttattgagtgatgaagaagcacgtagagttttgaaaaaaattttagcattgtatcctgacgcacaaggtgaattgcaatgggatactaactttcatttactttgtgcggttatgttgagcgcacaaacgactgataagatggttaatcgtgttatgcctagttttagtaaaatgttcccaaccccagaagtattagcaaaagctccaattgaagagattgagcatgagataaaaactattggtctatttcgttcaaaagctaaacatttaaaggccactgcgcaaattttggtcgataaatataatggacaggttcctaaggataaaaagttattgatgaccttaccaggggtgggagagaaaactgctaacgttgttttggctgaaggctatggtgtgccagctattgctgttgatactcatgtgtcacggatttctaaaaagttccatattgtagatgacaaagctactccacatgaagtagagaagcgattagaagcaattttacctaaaagtgaatggataaaaacgcaccatgcgatgattctatttggtcgttatacaatgccagctcgagctaaaggcgatccgtattcttatttaaattccgaaaagtaaagccgaaataaattcggctttttttattgaataattttatataatctgttgttactaaattttgattttataatttcaggcctcaactacgtttcggccaaaataaaaacagataacaaaacgctatctgttaataaatatatttaattattgcctagtcattatccgaatcatcattacgttcatgtgattcttcctcaggttttctcgttgatgaactttgttgtgttgaagaagattgtgttcttctttgagaggaagaggctcgctgactgctattggattgagatgatgagccattttcacgacttgatgatgattgagtaactgcagttctagaagatgaaggagtagttccagtattatcgcttgaagtatcagtttcttcatcgtcttcatcataacttgctgcactattaccaattccggctggggtatggcctcgaacaaataattgccaagtgccgccaccagttgctaattctggaggattagagttatttacaattttcgctcttacaactgagctaggctgtttccagtctaggttaggcttattgttcattaggtaggtcatcatactcttatacattagctgtgcagattgttgacctattccagaaatagtaccgtcctttaaattatcgtaaccagtccaaacacccataacatatgatctggtataaccaacgaaccatgaatcttttggagttgaattatagcttgggtacttagctagatcttcatcagagtatttaacagtaccggttttaccagcttgataaagatctgcaatttttgcattagtaccagagcctcgtttgattacgcctttaagcatatcggtaatcatgtaggcagttgatttcttcattacacgtacaccatttgaatcataatttctggttaatccatctggtgtttcaatcttagaaacaaattgcggcttgtggtatacgcccatggtggcaaaagcactataagcaccagtcatttgtaaactagacgcattagcgccaattgctactgataaaccagattttggtgaaacattaacgcccattcggcgagcaaaagctgaagcccgttttactccaacttcagcaagagttttaatagctggaacattacgtgactgctccaatgcatgtcgcatagtcatcatcccgtcgtatttgttgtcccagtcatataattggatattggtaccaggataaacatacttactgtcatcaatcatttttgctgttgaccaattcaagtattgaatagcaggtgcatagtcaagtactggcttaattgacgaaccggtagagcgtccagtttgaacagcccggtctaatcctaattgaacagaaggtaagtgacgtccacctaagattgcaacaacatgaccattgtttggatcaactacagttgcaccaatttgcattttattgtttgtaaaaggtacagaaccgttgttagctaactcgtacagcttgttttgagctttttgatcgatattaatagtaatctttaaattatcgtgatatggatcaaagcctttgctcttaacttcagaaattacctctttaatgtatggatcatcaatttttctaatcttagactcgttattatttcgatgtgatttaagtcccttactaattggttcagcaactgcttgattgtactcagctttagtaattttgtcattttgtagcatagtctttaaaacaatatcacgccggtatttggccttttgcggataaagatatggatcatatgcaacaggtgcattcggcatccctgcaatcaatgcagtttgtgccaaatctaacttacttagtggcttaccatagtagtagttagaagcagtacccatgccataatttccatagttcataaagactttattaatataaaattctaagatttggtctttactgaattcatgttggactttcatagctaaccaagcttcttgagcttttctcttcagagtacgttgagaagcagcagtagagaagaccgttagcttaactaactgctgggttatagtagaaccacctgcagcaatactattacttttggcattagttaacatagaaccaataattctaattgggtcaacgcctaacttatctttgtaaaaacgtttgtcttctactgaaactacagcatcttttaattgctgaggaatgtctttatttttaacataaattcttttttcagaaccaagtgatagtaaaaacttaccattattagtatatagacttgaagatttaccactctgcaattggtcctgactaatgttaggagcatctttggcataaaaagcaaaaagcccgattccagagattactattaaaaatatcagcaaaaagatccatttaatgattctaatccataagtggccactacttggccttcgaccatgatagtctcttcgtgattctcgtttcatattattgttattatctgccatgattatcttttcctatctgcaatgaatttatctaccgccttaagataaggcagtgtaggacgaaagccacttttgatttcaaaagaattgttttcaatttcttttaaagtcattgagcttttatctttttttcgccaagctcgaattacaaaactagctggagtaacaaagtagcgctctaagctagcgaacctaataattgtaaaacaaattccttgttgttttaagcattcgtccaagtgaaaaatttggtgttcatgaaagttttttaatgggaagttagttttattccgtgtttcttttgcctcaaaatcgagatagtatcctttataaacaccattatagtcagttgttgaagcttgcctaaagtaagcttcacgaatgaccgccttagaacgtttgggataatcaactttaacaatttgaattggggttggctttttatgaacaactgcaatttcttccattaaataatatttattagattcattgatttgttgctcaagtgtcatcccacgatcagaaaagttaacaccttttttatgatgatatgatcggtgaactggatgttcatcttttttagttacaggttttctaaatgcggctaaactaccgctaggatatttgaccattgtcctcactcctgttagcattatagcaataaagactacatttttgaacataaaggggggcttaaacaaatgcagcgtttatgggtgactggctatcgcagctatgaattaaatgtttttggcgatcgtgatcccaagataactgtcattaaatatgccctaaaaaattatctgacaagtctactggatgatgggcaattggactggattattactggagctaacctcggtgtcgaacagtggacagctgaggttggacttgaattaggagaaaaatatccggtaagaacatcaataatgattccatatgaagaatttgctaatcgatggaatgatagtaacaaagctaaattcttaaatttgaaggaaaaagtggacttttttgcttcaacttctaataccccttatcaaagtccacttcaattacgtaattatcaaaattttatgattcagcatactgatcgagcattgatgatctatgattcagagcacccaggtaaacctaaatatgattataatttaatccaaaaataccaggaaactaaagaatatccattagatttaattgatttttatgatttacaagatgcagctgaagaataccaagaaaatcatcaaataaatcatttttctgaataatatggtaaaaattttattaaagtctgtttctttattttcagtcagcgttgtttttgctaaaatagggtggaatgtaaaggagttgtcagtaagatggcaaatttaaatgatataaaattatcaggacaagatatattaaagaaacaattcaaaagtaaagtaaagggatatgatcccgatgaagttgatgcatacttagatgaagtaatttctgattatactacttttcaacaaattatcgaagatttgtatggtcagatcggtacgctccaacgtcaattaatggatgaaaagcaaaaagcaaagaaaacagttgaggctgaagaagaaaaggttaagacttatatgccaacgcatagaagaagtgcgcctgtgaagtttgcagaagatgcagatgatactcaaggtgaaatttcgactaatatggctattattcaacggatttcaactttggaaagaaaagtttataatctagaacaacacgtttatggattaaagcattaatttttgctataatgactaacagtgtgaattttgagtaggcgcggctagcttatgttagctgaggaaagtccacgcacacacagactgcgatgtttgtagtgatcgtattcagcctaacaagctggaggaggacgttagtcttcacggcggaaaaagtgctaaatcttcggacatgcattactatcctgaaaagtgccacagtgacgaagcaaggtcagaaatgactttggtggaacgaggtaaaccctgcgagtgtgaaacccaaatttggtgggggagtttcggcctaaggaaatgaactaaaggtcggattattgctttaagcagtaaagatagatgactactgaaggtaatctttgccagagattattggaacaaaacgtggcttatagaaattcacacaggcagagttgggcttttaggtccagctcttttttattttgaaaatgaaagagtaacaatgaaagaataccaactttacgcaactatgggcgctggttttgaaagtgtcgttaataaagaattacagtctatggggtataagacccgtgttgaaaatggtcgtgtcttttttaagggtggtcaagaagatatagttagaactaatctttggctgagaacagctgaccgaattaaaattttgctaaaagagtttagagcaacagattttgataccttatttaatgagatttatgattttgattgggccgaattattgcctgttgacgctaagtttcctgttcaaggtagagctgtaaaatccaaattgcactctgaaccagatgtacagtcaattgtaaaaaaggcaattgttaataagatggttgaccagtaccatcgtcgtggctttttgccagaaactggtaatgaatatcccttagatattcatatttataaaaatgtagctcgaatttcgctagatactacaggcgctagtttgtttaaacgtggctatcgagtagagcatggtggagcccctatgaaagaaaactttgcggccgggctattaaaactaactccatataatggtactcaccccttaattgatcctatgactggttcaggaactttagctattgaggcagcattaattgctaaaaatatagcaccaggaacctggcgtaaattttcctttgatggttttgactggtttaaccctaaactacataatgaagtattggcaaaggctaagagtgaagttaagccgcttgaagcaccgatttgggctagtgatattgatcagtctgttcttgaagtagctaaattaaatgctcacaatgcaggtgtattgcaagatattcgctttaaacaaatcgcagttaaagactttactactgatctagaaaatggaattataattgcgaacccaccttatggtaagcgattgaaggatcgtgagtcggcagaagagctgtatcgccaaatgggagaagtacttagaccgcttagttcgttcagtcagtattacttaactgcagatcctaactttgaaaaatgttttggtgcaaaggctactaagaagcgcaaactatttaacggaaatttgcgggttgatttctatcagtattgggctaacagaaggtaagaaatgattacaaaagagcttaacacagaattttgggtgatctcagatacgcacctaatcgcagatagtttacatgatgaaggacaagccttttcacgcatgcaaaaaactagtcaaggtaaggatttgtattatcaagaaatagccctttctgcttttatgcgaatggcacaaagaaaaaagcctgccgcaattattgtaactggtgatgtgacatttaacggtgaacgagtttctgctgagaaatttgctcaaatttttaagccgttgaaagaaactaaagtgttagttttacctggaaatcacgacatttttgatgggtgggctagagaatttcgtggtaaaaaacagttctatgctggtgaaattagcccaatgttttggcgctcgatctttgataaatcatatcgtgaggccttagatgaagacgataattcattggcttacagtgtccaactgaatccgcaatatcttttagttttagcggattcaaatatttatggaaaagaagagacaacagaagcaccgcacactcacggcgaaattggaaaagtacaattaaaatggattgaaaaacaatttcgttatgcgcaggaacatcagttacgtccggttttatttatgcatcataatttatatgcacataatccagcagttaacaagggctatgtagttgatgacgctgttgagctacgacgtttgtgtgcgcgttacaacgtgaaattagctttttctggtcatattcatgctcaaaatattatgggaccacaagacatgacgcctacaactgagatcgttacatcaagtttttgttctaatgatcaaggctatggagtagtgcgagttcattcacggcacattacatatgtgcggcgtaattttgatatgacaagatatttaacggatgaggaaaaggaaaattatactttagttcattatcataagtatttaaaagatctacagcttggtagtatttctgcggatatgatgcaaagtgaattaaatcagtatcacgaagacatcgagttagttagggcgatggggaatttgtttggctggatgaactatcatttctttaatggtcataatcatataaaggctagcgagttgaataaaatccatgcttctaaagaatatcaagttttgattaagcaccatcctgagtatcggttatatctaaagacgctgtacgacacaagtgatcactctaatttacaagtgaagatacgatactaaacaaattttagtataatggatactgattctaaagaaagcggacatgattatgttaaaagatgaaacaaaatttgatcaattagggcaaaagctttttatgaaaggtgttttgcaagacttcgaaaagaaaaatggtccaattaagggcagaatgatggttacagaaggaaagattccgccggaaatgttaactaagctgcaatctgaattgatgaatagtagtaattggattgtagttgaaggtagttttgatttttataattatactgtcggcatgattgtagatttgactacaggtaagccattagcaaatggatggttggtaccacaattgggtcacccagggatgcaacctgcagagaaatggcaagaatttttgattgaaaaagtcgttgatgcaatcgatgaaaaaggtaagattaatttgccgctatatgtttggatttcagatcgtagtgatttgaccaagacggatcaagatttataaaaatatttttaattatgtaaagcttaaacaaaaaggtaggtcaattttgacctaccttttttaggatttatttattagtattaagaagttattgaattaagtaagtagatattatttaaccagtttaattttcaaagtgagctagttattaattgcctgagcagatttttgagcatcccaccaatcgggtaaatcacacaataacttatttaatgtattattgcggtgcgaaattgagtttctctcattgagattcatttctgcaaaggtttttcctagttctggaactacgaataaagcatcgtaaccatagttactgctaccatgtggatacttagcaattaatccactgattctaccagcactaacaatatcattgctttcttgacctggccaagtaaagacaaaggtagtgtagtagctagctgtccttttttcactagaaactccacctaaatagcctaataatttagctttatcatcttgaccattatggtggtaaggcaagattcctaaagagttaagtagataatcaacacttagacctgagctttctgataatgtaggcaaattggtaaattcagctaaacgatgtgctgtagctctagcattacttaaaaatgttgcctcagaatatgacttttgtggtgcataatctacttcagctaaaccaactactttgataggaagactaagctggttaagtttatcttgtaattcattaattttattttggtcatatgttgtaaataataaactatccattattttccccatgctttcaaaaatagatataccatttatattgtatccgctttcatatactgcacagtcattgtcttatctttgtgaagtaaagtcaagcatagataatagcttttatcaaaaagtccatatacttcaggtttttaaactgaataatgttatttttaatgactaagattgtgaaaattatagaaactgtcaaatcttttgtgtaaatagatctttctcgtaaattgattttttaattatttatttaatcaaagtaggattctaaggtgtcctgaacctgaccaaagcctttatgaattcgattgaaataacggtcattgtagctcattgcctgaatgccaataaaagcatcaagcgactgttcagttggaaactctgccttaggcttagctttgcgcttgatcacattgttaaatgattcaatcatgttagtcgaataaattgaagctctgatctgcttgggatagttataaaagaccagcagatctggttctatgtctttcaagcttctgataacatggctgtaaaccttgccccatttggtatagaagtcatgcaggacagctgtggcttcttctttgtttgtctgttgatgcacctgtttgaattcgttcatgatcttttcacgatcgtcgacgcgtactttagcgcagatattgcgcatgacatgaaccaaacagcgttgaaaatgagctttaggataagtcctggccaaggctgttttcatgccaacaacaccatcagaaagaaaaagctcaacttgctttaagcctcgggatttcatgttttgaagcatatctgtccagacttcaatgttctcgctaggcgcaatgcagtagtcaatgacctccttgtgcccattaggcttgatgccaatggcaatatagactgcttcacgctcaaatgtttctcggcgcaaaggaaggtatgtcgcatccaaatagacgcagaaaaacttgtcgcttagcttgcgtttgtggtaagcctcaacctttggaatcatctgcttggaaatatttgatacctgagctggactgtaatggctgccatacatcttttcaattagatcggctatttccctggtggtcacgcccttggagtaaagcttgataatcatgctttccaagatatccgagtgctgcttgtagccaggcagcgtgtgctgatgaaattgaccgttgcgatcccgaggcacttgcacttcaattgggccaaattgcgtatcaactttgcggaaataagcaccatttctagagttgccagtattccagccatttctggcatagggatcatagcccagaaaggcagtcaattcagcttctaacaagttattaacagcctgttgtagctctttgcgcaataaatcatttattttgtctggattgaatagagcttgagcaaaatctttggtaaaatcattcatgaaggagttcttctttctgtatgtgtttttttgttcaaaccaatcatacgagaaaggaactcctttttctaatgtttaaagaaataaatttaaggaatcattcatccttacacaaactattttacagtctcgattaatcaattaataaaaaaataaaattgtattttaataaaaaagagaaaatcttttttagattttctcaattatgattaactagctattaaaaatttccataatgcattattggtgtaccagttttgcggttgaattgctcctagacaggctacaataatataaattgctaatgttgagattatgaatgcaatgcctaagttgacaatgttgaatggaaaggtagttttatgttgtttcattgcgatgtgaatggcgaaagccaacagaaccaaacctataataattccaaattgataataaatgctcattttctctcctaagttacagttaaaagtatacgttaaaatcggattaaagagtgatttttatttatctagcctctttattttatcaaaatcaatgttatattagagaggtagaaagaagattatgtacatatgtctgtagatatttacaatgaaaaacttgaaccatacgacgatggtaagcgtcataaatttagtggtacttttgatagattaaacgatcgcttagctatttttaaggatttgcgtattgcaggtgctggtggcaatccaattgttaagcagttagcactgcattacttgaaaactttcaaagaccttgatttgaagaggggcgatgtagttgaatttgaaggcatggttgaaaaagattctaacaatggcttcacaattgaacgcccaactcaagcagaaaaaatcagatcagcagctgccgatgatgctaaagttgacgtggttggcgatgattggaattggtttgaaaattagttaacggaagtgacttacgagatgtaagccgcttttatttttgaaatttaagtcatagctagaaatgtagtaaaattaagcttgtaaggagaattagatgcactttgatatctttaatcgaaaaactgtctcaactgataaaatgtttttccagacaacattaaatcctaagcaagcaataatcattggcaatggtgctaaatttcgacgttgggttttcttttctactaattttgctacattttatgtaatcattctgtcagctattagtattttattaattaagtctaatgtttctgtactaatttgcttactattagcattagcaaatttagtaattaatcgctcaatacctcgttattggcaaactttctttggcccgaatgctgaatatggaaaaaatcatcgtccagctattttgcctattttatatatcataaccttgttcggttggctttggagcgtatcacatttcgtaggatctttaacttttattactggtacatttgtgctagtaggtcttgcaggtagtttgttatcgctctggatatggatgaatttgaatactgttagttgtgctccaatcagtgaattacaatggcgaaacaatgccaaacgcaggggaatgtctgatgaagacattgataaggttattgctagtttaaaaaagcgtagagcaatatattttagtaaacacgataaataaaattatagacgaaagatagaatttaatgacagattttacagaatttgaaagtacaattttttcatcagacgataattttgccattcgaaaaattaaacataatgtcattttgacgtattgcactcaagatggtgaaaaagaatatgaaagcctaagtaagaatacatatcgtgtattttttgaaaataatcttgaagttagtcgactgtatccacctgatgaattcagtcacaattggctaatccaaattttaatgccgcaactttcaattgattcgctcaaatctatggcgattgccttaactacattagaaagaattgcgcaaagtcaagaaggcatgcaattatctgaatatgttaaaaatagtgagttagtagaaataaagtcctggtttgatctgcgtaataagttgcgaaaaatatccaaagcttatagcctaattaagcaaagtactgatcaaacaacacagtggctaggaagtgatggacatcgttatcgtgaagtgattttagccaatagtttacggcttaattatggtcaagatgaagttgttcgtttaattccaattaaaaataattgggttattcagtttgttaaaactgatttcagtgcaactgatggcgtaattgatcagctttttgcggcattaacattattgactcaatatgtaaaacaaatttaaatcagagatgaaacatattctttatgcccttaatgggacttttttaatgttactcgttccggctttatttgtattagcattacgacaattaagccatgaagctaaccaaaaattggtaaatacatttggttttaatagtcaaattattgttggcggattaggaattattgttcatgaacttagtcatttgattatggctataatttttggtcatcatattaatgcggttagtttattgcgcatccctagtaataccaatgatatgtcacttggctatgttaaacatacttggtctcctacatctacttatcaaaaggtgggtaatgcttttattggcattgcacctgtattaggatgcaccttgctgatttacataatcatgcgtacattgaatacacctatttcattggttcagaatcagcttactactcagttattaagtaatggtaatgcacttaactggaatttcttaactcatagttggatttatatttttgaattatttcagcttaattttgattcaatatggcactcaattgttgctttattgctagtaatcagtctatgttttggtggattcgatttaagcgaggctgatataagtagtggcaaatatgcttttttaggattaattggtataacctttattatgcttctcttagtttcttttctaggctttcacgctgcattattaccgtttttagttaatattactgtctggatttatttggtattcattatatcaatagtgattttagcaataattaatttaattatgtatattttaaatattattttataaaggagaaaataatggcaaaagcgttattagttatcgactatagtaaagactttgtagctgatgatggagctcttacttgtggccagcctgctcaagcaattgatcaacgtattacagaactgtgtaaacagtttctacaaaataaagattgggtgattttcccgatggacgcgcacttaaaaaatgatccatatcaccctgaaactaaattatatccaccgcataatattattggaactgctggccgtgaagtatatggtcaaacgggtaaatggtatttagaaaacaaagataatgatcatgttttattaatggataaaaatcgttattcagcttttcaaaatactaatctagataattatttacgtgaacgccatattcatgacctgacactaactggtgtttgtactgatatttgtgtattgcacacagcgattgcggcatataatttagactatgaaattacaattccacgttctgctgttgctacttttacatcaaatggcgatgaatgggcaatggctcactttaaaaatgcattaggtgcgaatattgctgattaatttaatggcctgcataatttactagtaagtccaattattactatctaataaaaatatacattataattaatgtaaaggaaaaagctatgtaaagtgaagaggtcaaaatgtatacaaatattcgtaaatttaaaaagggcggaaactacccggaacagcaaaatgggctaccacaagcattttttcataatcccaagtataagaagttaagccccgatgcatgatacctatacatgatacttacgatgagaatgattgattcacaaaccaatggatgggtagatgctgacggtaatatgtatattatttattctaatcaagagctaatggatgacatgcattgcaattcttatacggtgaaacgactaaagaaagaattggttaatcatgatttgttactcgaagaagatgctcctgcagaacatgatgataggttatatcctttaagaattaatgaaaacgaaaaatgataaaagacattggtaaatacggccaatgtcttttatttagtattagtaaagaaaataactaatgtatccgcatcaggataaggctctgaatgaacacttaagaaattttgcagtttatgattgtattcaatattattttcactttgactattttgataaatttgctctagccagctcggttagccggataaatagcattgttcatggcggaacctacagcgttactttgaacgtcatttagtaaatatgatgtcccaatttgattaatttgattgagtaaatgatctatgcgttctatttcctgcttcttatcatgtacgtttggcacaagcagtagagagacggctgtaatatccatttcacattgtgcccaaaatttatcataaagcttgctaaagttttgatctgattgagctaaaagccattcctggtagatttttaaaatacgaattgttttttgaatatcatataaataaagcttacgataactaaactgctgaaattttcttgtaattccagaaagtagttctgtatagcaatctaagtcttcagcaattttaattgccgagtcatttttatttcctttctgtattttatttacattagctgatacttatataagtctatatgataatactgtactttctatacttttattataagatcatcgcatgatttgttaataataaaatgctcactaaaaatgttgtgacaatttattattaacaactaaaaaattatgatagtgtaagtagtaataattatgaaagagcgtgatgtaaatgtctagatggcatagattatttcctgaacgagtttttgatcgtggagaaatatattatggcaatgatatggttgaaaatattcaattagctcaagatcaggaacactttaccgctcaagttcaaggcggaatgggtcgttcttatactgtaactggtcgtcttcgtttagatggtcgagcttcagagttagactgtaattgtccatgggctaataaagggcatcgctgtaaacacgaggttgcggctttacttgcagtagaaaacgaacaagaaaatgaacataacgttaaagtcccttttgctgacttaatttctgaacatcttaagcaaatgattgcacataaaagcccagtacttaaccccttaaatttgattggcaatatgaaatttaccaaaaaaagttatgatcaggcactggaacttaatgatcactggtcgattagtagttgtcggcattttgatgataagatgcgtaaatatgaatatttttgggagatagtaacagaggacaatgagttaattacattatctgtgcaatttactcgctggcaaattatatcaattaaatttgatagtgatttttcccgtattgaaaaagatagtgttagaatattagctctgttttactttattaatgagtatcttgatgacgatccatttgatttaactaaccaggccgctgaagatctacttgaattttatagtgacgcttctacccaaaatgatgagccgattattttgcgggcaagtattgataagtataataacatccctagtttgacgtttaaattaggaaagaacaagcatctttataaagttaaagatcttaatcaactagtagatgcatcccgacacagctcttctctaaagctaggtaagtttttcaacgagcctataaatcaggctaaaatggatattgatagtcaacactggttatcttttattgaaaaaattatagatgctcgtaatctaaacgaagaattttattataattacagtagtcaggttggtcgcattacactagagaactctgtggccgatgaagttaatgatttactttatcaaggcgtaaagttgtactcaaatgagcagcctataggatatacaactgatcaactagatttaaacattaaaattgaaactcaaaagtcatctgctttagttagtgtagaggatcttccagtttctactataattactgggagtcatgcgtattatggctattacaaagatgtatggatcaaatatataggtcttacgcctgcttctttgcataatttaggattgcagcctggtgctgaaatgcaatttagtaaaaagaccgttgctaagtttgcacataatattttgcctaaatttgagcaaacaaagtttatattagtgtctggtactgatgaattgaaagctattttgccaccagaggcccattttttgtttaaattagattatcgtgtaggcagtattttatgtgtggctcgagtacagtatggggatgcacaatacgagttaaatcaaggatatactgaagaggaccgacgcgatgttgaaaaagagaccgcagcatggaagcacattaatacatattttagtgattatcagcatgggcggtatgttttatccaatgaagactcggatgtcgtacaagcttttctagatgatggtatcaatgagttgaaacgattaggcgaagtacaaattacagctaactttagatcacttttaaagggaataaagattaatttggatgttggagtaggtatcaacctgactaatgaattattagatatcgatcttgctgatcaaaagatgagctgggaagacattcaagcggctttgaaagcctaccaagaaaagcgaaaatattttgttttaaaaaatggaatgctagctaaggcagaacaaccgacaattgaacaattggcacaaactttgcatgatttaggtattagttttaaggatttcattcacggtaaattacatttaccagcatatcgtgccttttattttgctaagcaaatgaaagctgctaatgcactgcatttctcaactaatgaatcctttaatactctgattaatgatttagctaagaatcagttgaagcaaaatcaaataccagttagtttgcaaaatattttgcgtccatatcagaagataggttttaattggctaagcactatcgttaattataaatttggcgggctacttgctgatgagatgggattaggtaaaaccttgcagattattagtcttcttttagctcgcaaagaaaaaatgcaaaatcagttacctagcttaatcgttgcgcctgcttctgttatctataattggcaggcagaagttaaaaagttcgcacctagccttaatgtggctctattagatggcactaaaaaagaacgagagagattgcttttagatgctaaaaagtataatctgctaatcagttcatatcaatcgcttaatcgagatctagaagcgtaccaaaatctaatttttgatgtagaagtaattgatgaagcacaaaatattaagaatcagcaatcagttaccgccaagacagtcaaagtcattaaagcgcatcataaactggctctaacaggaacaccgattgaaaataaattgagcgagttatggagtatttttgattacttaatgccaggttttttaggtttatatcctgactttaggaaaaagtatgaattaccgattgttaaagagcaagataaagaagcagaagatcaattagctaatatgataataccctttatcttgcggcgtctaaaaaaagatgtgctacgtgacttacctgacaaagatgaagaaattgtgcctgttaaaatgaataagaaacaagctgatttgtataatatgcagacgcaaaagattatcgctcaattaaatggacagggggatgaagactttaagagatcacgttttcaaattttggctcagattactaaattacgtgaaatttgttgtgatcctcatttgctttatgaaaactatcacggcaagtctaataaattaattgctacaattgagttgattaagaataatctagcaaatggacataaaattttattgttttcacagttcacagctatgctagatattttgcatgaaaaccttgccagattaagactacctttatttactattactggatcaacacctaaaactaagcgtcaagaacaagttcaaaagtttaatcaaatggctcaaccaggggtctttttgatttcattaaaagcaggcggaacaggcattaacttgactggtgctgatgttgtaattcattatgatccttggtggaacttggctgcagaaaaacaggcgacggatcgagctcatagaattggtcaaaagcattctgttaagatttataagatggttacagaagacagtattgaagagagaatcattgctttacagcaaaagaaagcagaattagctgatataattttgcaaaatgatcagattgctgatgcaacaatgagtaaagacgatttaattaagattttgaaataaatagatcattataataaaataaaaatatttgtttgtacttgcgaactattgtttgcaaaagtataatatttaggtaaacaaaaaccaacaagctaaatgcttgctggttttataattttagtttgagttagtatgtttctttttataccaatacactagaccgaatggaaccagattctcttggtgatgttcgattcgaataatattgcttcggtgactccagtaaattaagattacgagcaatccactgataatgctcaaggcaagatcgtggaaaaagaatgaagcaataaagattagaactactgagatcaaactagttaatgaaaccatacttgtaataaataagatagggaagaagattaacgcacagatcaagaaaaaatggacattatatcctagtaaaaatccagcggaagttgctactgccttgcctcctttgaactttaaaaagacaggaaaagcgtggcctaaaattgcagctaagccaaaaatcaagcaaagataatgtggtcctagtttaaaaattattggtaatactgtagcaaaagttcctttgagaaaatctactataaagacaatgattccagcagctggtcctaatactctaaaggtattagtcgttccgatatttccagatccgtatttcctaatatctttatgaaaaaagatattacccactaacacacctgttgggaatgatccaatcaagtatgctaaaataaacaacgatgcaaattttaatgcaaacatatttaacaacactcctattaatctatcgctattttagcaaagattatcttttaaatatatggtgctggttaaattaatgaacaagtggaggaattttagtggcaaaagctaatacttatgatgattcttcaattcaaattttacatggcctagaagccgttcgtaaaagacctggtatgtatattggttcaactgatattcatggtcttaatcaattagtgtatgaaatcgtcgataactctgtcgacgaagccatggctggttttggtaaagaaattgatgtaatcattcattcagataatagtgttactgtaagagactttgggcgtggtatgccgacaggaatgcacaaatcgggtaagcccacaattgaagttattttaactgtattacatgctggtggtaagtttactgaacaaaattataaaacttcaggcgggttgcatggcgtaggttcatccgttgttaatgcactttcaagttatatgaaggttagagtcgttcgcgatggtaaagcttatgaagaagaatttaaagatggtgggcatccggtaggtacattaaagtgtgtaggaaagacaaaagagccaacagggactaccattacgtttaagccagatgagactatcttttcaaccacgaagtataagtatgagacaattcaggagagaattcgtgaatatgcttttctacttaaaggggttaaatttttcttaacagatgagcgtgagccagaacatcatgatgtttttcagtatgatgatggaattaaatcatttgttaagtatttaaacgaaggtaaaggcacaattagtgatgtcttttattttgaaggcaagcaagatggcatggaaattgaattttcaggtcaatatagtgatggatattcagaaaatttagtttcatttgttaacaatgttagaactggtgatggtggtacccatgagtcaggtgctcgtagtggatttacacgtgcatttaacgattatgctaaaaagcagggtctactaggtaaaaaagataaaaatattgatggttctgattatcgtgaagggcttagcgcggttttatctgttaaaatccctgaagaattacttgaatttgaaggacagactaagggtaaattaggtactccacaagcacgttctgctgtagattcacttgtttatgagaaaatgtcttactatttaatggaaaatggtgagctggctcaggaactagttaagaaggctcaaagggctagggatgcacgtgaagctgctaaaaaggcacgtgatgaaagcaggaatggtaaaaagagacgaaaaaaagaagttttgtctggtaaattaacgccagctcaatcgcgaaatcctaaaaagaatgaactattcttggtcgaaggtgattcagctggtggatctgctaagcaaggtagagacagaagatttcaagcaattttgcctcttcgtggtaaagtattaaatactcaaaaggcaaaattgcaggatatctttaaaaacgaagaaattaataccatgatttataccattggtgctggtgtaggaaccgagtttaatgttgatgactctaattatgataaagtcattatcatgactgacgccgacgatgatggtgctcacattcagatcttgctattaacattcttttatcgttatatgcggccgatgattgaacacggaaaagtttatattgctctgccaccgctttatcgcttacaaaaaggtcgaggcaaaaagacgcaagttcaatatgcatggactgatgaagaactagctgatgatgaaaagaaaatgggacgtggctattcgctgcagcgattcaaaggtttaggtgaaatgaacgcggaacagctatgggctactactatggatcctcaatcgagaatgttaatcagagttaaaattgacgatgctgctcttgctgagagacgagttactaccttaatgggtgataaagtagccgcaagaagaaagtggattgaagaaaatgttaaattcagaatgggcgaagacggctcaattctagaatccgaagatgaataaaagaaggttttaaatttaatggccacaaaagaacgaattcgagaaatgccacttgaacaagtaatgggtgaacgttttggacgatattcaaaatatattattcaagaacgtgctttgcctgatattcgagatggcttaaagccagttcagcggcgtatcctttatgcaatgtatcaagatagtaatacttatgataaaccatttaaaaaggctgctaaggctgtcggtaatatcatgggtaactttcaccctcacggtgacagctcaatctatggggctttagtgcacttatcacaagactggaagatgcgcgaaccgttagttgaaatgcatggtaacaatggttcaatggatggtgatggcccagcagctatgcgttatacggaatcccgcttaagcaaaatctctaatatgcttttgcaagatattgataagcaaaccgtaaacatggtgcttaactttgacgatactgagtatgaacctacagtcttacctgcacgctttcctaacttattagttaatggatcaactgggatctcatctggttacgctacagagattccaccacataacttaggtgaagtgattgatgcaacaatttatttattgaaacatcctgatgcttctcttgaagatttgatgaaatatgtaaaaggccctgactttccaactggtgctattgttatggggactaagggaattaaggaagcatataagacaggacgtggtagaattcaagtccgtgccaaaaccactattcaagaaattcgtgggcataggcaagaaattgttgctacggaaattccattcgatgttaacaaagcactattagtaaaaaagatagatgaaatccgtctgaataaagaaattgatggaatcgcagaagttcgtgatgaaactgaccgccatggtttgtcaattgtgattgaattgaaaaaagatgctgatgcgcagaatattttaaattatttatttaaaaatactgacttacaagtatcttataacttcaacatggtcgctattgatcacatgactcctgttcaagttgggctaaaacgaattttagcttcttatttagaacatgaagaagacgttgtaactaaacgtacgaaatttgacttagataaggcagaagctagattagagattattcagggcttgattcatgccatggatattttggatcaagtaattaaaaccatccgcgcttctaaaaataaagccgatgctaagaagaatttaatagctaagtataataaatttactgaaaaacaagctgaagcaattgtttctttacaactttatcgtttaactaatacggatgttaatgaattaattgctgaacaagacaagttaaataaattggccgaaaaataccgtaaattattatcagatcgtgcaactttagaaaaagaaattattaaagagttaaatgcagtcaagaaagaatttgctaatccacgtcgaactcaaatttcagaagaaagtgctaaagttgaaattgatgaaaaagccttagttgctgatgaacaggttagagtactaattagtcgagatggctatttaaagcgttcatctttacgttcatatcagtcaactaatgatgatgacaatggtttaccagatggtgacaaagtagtttatgaaaacacactatctaccctgactaacttgtatttatttaccaataaggggaatgtcatttatcgtccagtacatgaactaattgaaaccaaatggaaagaaacaggacaacacctatcacaagaaattggattagacagtgatgagcaaattattcgcgtctttgtatttgataaattgaatactgattgcaactttattctggctactaatgacggttatatcaaacaattggagttagctaacttacagccgacgagaacttataagtcacgtgcaatgacagctatcaagttaaagggcaaggatagttatgtagttggggtagatttgatcaaatcagataatcataaggaaatcacattatttactcatcgcgcctatgcaattagatatgatgttagcgagataccaacttcaggagctaaagcagtaggtgttaaatctgctaacttgaaagatgacgattatatcgtaaattatgtcctagttgattctaagtatgttgatttaatgcatgttgggctaattactcaacgtggggcatttaagcaattcaaacttaaactagttaataaagtttctagagccaagcgaggggtactagtactgcgggaattgaagaataaaccgcatagaattgttgctctaatgccatatgctcaagatcatttgttacatgtcactacttctagtgaccgtcatgtaaatattaaaactacggattatccattaggcgatcgttattctaacggctcatttgttattgatactactgttgatgggacgcctgtaagtattgaattgggaagacccattagtagtcaaaattaagatttgagtttaactaaaacaatatattaatctttaaaaacagtgttaagacatatgttttgacactgttttgttttggatagataatagcagtgttatgggacatggcttatcgtaaaataatattttaggaaagagataatcgttatgtctaaaagtgatactattttatcggctaaatcattgcgttattttttacaattgattgagacgatgaattatacccaagctgcacaaattttaggtattacccaaccggctttaactcagcaagtaaaaaaattggaacgcgctattggtgctccattatttggacaaatggggaagaagttatacctaaccgaagctggtaaagaaatggaagcagcagcgatagagttgctaaataccattaatggtgttattagtgacattcaagaatatacccagtcagataaaggcaatatttcaattggtattctagagtccgtacatgttgatcttttctaccaatttttacgttacttcaataaaaagtatccagaagtaacttttactgttgattactttgaccgcaaagagctatggcacagacttgattccaatatgattgatatggcgattatgtatatgccagatactactaataaaacaggagctaatttccgtcatcaatacaatcatcgtgatatttgccctgagcatattgttgtactgactcacaaggataatgtggaagcaggagggacatattctgttactcgttttggcaacagaaagtgggttgcatatccggagaattactacttatcaagattaatgcgacttaactttagtaaaaagattgatctcgttactccgtttaaaattgcatctactaaggaaatgatcaaaattgcagaaaatactgatcttgatacttatgtagatcagacttactatgaggcgcataaggatgagattaatttgactcctgtttatattaaaaatatgcctgagtttacgactgcttgtgtttatcgtagaggaaaattagatgttcctaggatgaagaaattactaacggaattacagattttcttagacaataacttggataggaaccataattttagtaaactattaagtgaagaaattaaataaaataattagaaaaagaggcaatttatttaatggaaaaagaatttgtttttggacaccaaaatccagatactgatgcaattggcactgctattgcattttcatatttgcaaaacaagttaggttacaacactgaagccgttgccttgggtgagcctaatgatgaaactgcatatgctcttaaaaaattcggctttaaagcgcctcgtgtaattaaagaagctgctccagaagttaaatctgttatgttggttgaccacaatgaaccacaacaaagtgtttcagatattgacaaagttaaggttactcatgttgtggatcaccatagaataatgaattttaataccgctgatccattatattaccgtgcagaacctgtaggctgtacttcaaccattgtttggagaatgttcaatgaatttggcattgaaattccagaaaactacgctggtttaatgctttcagctattatttcagatactttacttcttaaatcaccaactactacagataaggataaaaaggctgtagaagcattggctaagattgctggcgtagattacaaggaatacggcttagcaatgcttaaggctggtactaacatcagtgacaagtcagaagaagaattgattgatttagatgccaagagctttgaattaaatggtcacaacgtccgtgttgcacaaatcaatgttgttgacttacctgaagcgttagaacgtaaggaagcctttttaaaggcaatggatgcttcatctaaggataatggctatgatatgtttatgcttttaattactaacattcttgactcagattcagaagctttagttgttggctctgatgagactaagtcattattcgaaaaagcatttaataagcaacttagtgattcagaagttgaattacctggtgtagtatcacgtaagaagcaggttgttccacctcttactgatgcttttaatgcttaaaagtaatgatgtaaaaaataggaggtagggttaaccgcctcttattttttacctaaaaattaaaactgattttaggagaaaaatattgaaatacccacaattaaatttagaaaatcaacagggaccaacagctgtattgaaaaccaatcaaggtgaaataaaaattcaactttttccagaacaagccccaatgacggttgaaaattttattcgtttagctcaaaaaggctattatgatggtactatttttcaccgcgtaattagcgattttatgattcaaggtggagatcctgaaggaaatgtcactggtggtgaaagcatttgggggcatccatttgaagatgaactttcacgagaactttttaatattcgcggagcattatcgatggctaattcaggccctaacactaatggtagtcaattttttatcgttcaaaacaagaatatgcctaagcgttacataaaacagatggaacccgcaggctatccaaaggaaattattcatgcttataagcaaggcggaactccatggcttgacggtcgtcatacggtctttggacaagtaattacaggcatggatgtagttgataaaattgctaagtcgaaaaaagataaaatggataaaccactagaagatataactattgattcgatccaagtccaaggatcaaagtttgatgactaacaaaaacgtgctgttttttcggaataaacagcacgtttttgttaattattcatttcttttagaagggtgatcaaagacttacatacgcgttcagccttaggttctggtaattttcttaattcgttaataacttttttcatgaaaacgggtgtattgttatcatgaattttttcaggcttgatttttttagcacgataggcattgttaatgatatcgggtgtagtagtattcaaagctttggcaatagaatcaagcttctgaatactaatgttttggtccttagtcctttccacacgtgaaataaaatttacagaaagatcacttagctcagccaaatcttcctgtgttagtttctgttcacgtcttctacgagaaatttcttctcctaaattaatattcacaagcattcgatcctttcaagtaacttatagtctattatagcctatataaaattatgtaaaaaatgaatagactattttaatattctcaacatacacttatattaaataataagaaattatatttgtttataaatgtacatttttagcgtaatcagtgctattaggcactacagttgagaccgtaaaatattttgtgtaaggatgaatatttccttaattttattttcctgaatattagaaaaaggaatccttttcccgtatgattgatttgaacgaaaaacatactagaaaagagattccttcatgaatgattttaccaaagatatggctaatgctctattcaatcaggataaaattaatgatttatttagacaaaagctccaacaggctgtcaatgacctgcttgaatccgaattgactgcctttttaggctacaatccttatgagcgcgatggctggaataccggaaattctagaaatggtgcttattaccgcaaggttgatacgcaattcggacaaatagaaatcaaagttcctagagacagaaacggtgagtttcatcaacacactatgccagattataaaaggcatactgatgttttagagcaaactgttatcaagctctattccaagggcgtcacaacccgagaaatcgctgatttgattgagaaaatgtatggcggctattattctccagctatggtttccaatatttctaaagaaatgattcccaaagttgaggcatatcatcagcgacatctgtcagataagttcttctgcgtttatctcgatgccacctatattcctcttaagcgggtcacttatgagcgcgaagcagtttatatcgccatcggtatcaaacctaatggtcataaagaagtgattgactactgtattgcgcctactgaaaatattgagatttggagcgaaatgctcaaaggcttcaagagtcgcggccttgaacaggtagagctcttcttgtctgacggagtagttggcatgaaagaggctatctgccagtcctatcctaaagcgcattttcaacgctgcttggtacacgtcatgcgtaatatcagtgccaaaatgcgggttgacgatcgaaaaaaagcactggatgaattcaagcagattcatactcagtcaaacaaagaaatggctgtacaggtgctgcatgaattctatcaaaactgggaaaaagcctacaaaaacgtagttagagatcttagacaggttgagcctgatctgttaaccttttacaactatccgccagctattagagcttcaatttactcaactaacatgattgaatcctttaacaacaggcttaagcggaaaaccaagcctaaaacagaatttccaactgagcagtcgcttgacacctttattggagttcaggcaatggattacaatgaccgttactttaacaggattcataaaggatttgggcaagttcgagacaccctagaatcctattttgattaaaagataaataaaaaagtcaatcaacgagagagattatttacacaaacttcttgacagtctcctacagtttagaaactgtcaaatcttttgtgtaaatagttctttctcgtaaattgattttttaattatttatttaatcaaagtaggattctaaggtgtcctgaacctgaccaaagcctttatgaattcgattgaaataacggtcattgtagctcattgcctgaatgccaataaaagcatcaagcgactgttcagttggaaactctgccttaggcttagctttgcgcttgatcacattgttaaatgattcaatcatgttagtcgaataaattgaagctctgatctgcttgggatagttataaaagaccagcagatctggttctatgtctttcaagcttctgataacatggctgtaaaccttgccccatttggtatagaagtcatgcaggacagctgtggcttcttctttgtttgtctgttgatgcacctgtttgaattcgttcatgatcttttcacgatcgtcgacgcgtactttagcgcagatattgcgcatgacatgaaccaaacagcgttgaaaatgagctttaggataagtcctggccaaggctgttttcatgccaacaacaccatcagaaagaaaaagctcaacttgctttaagcctcgggatttcatgttttgaagcatatctgtccagacttcaatgttctcgctaggtgcaatgcagtagtcaatgacctccttgtgcccattaggcttgatgccaatggcaatatagactgcttcacgctcaaatgtttctcggcgcaaaggaaggtatgtcgcatccaaatagacgcagaaaaacttgtcgcttagcttgcgtttgtggtaagcctcaacctttggaatcatctgcttggaaatatttgatacctgagctggactgtaatggctgccatacatcttttcaattagatcggctatttccctggtggtcacgcccttggagtaaagcttgataatcatgctttccaagatatccgagtgctgcttgtagccaggcagcgtgtgctgatgaaattgaccgttgcgatcccgaggcacttgcacttcaattgggccaaattgcgtatcaactttgcggaaataagcaccatttctagagttgccagtattccagccatttctggcatagggatcatagcccagaaaggcagtcaattcagcttctaacaagttattaacagcctgttgtagctctttgcgcaataaatcatttattttgtctggattgaatagagcttgagcaaaatctttggtaaaatcattcatgaaggagttcttctttctgtatgtgtttttttgttcaaaccaatcatacgagaaaggaactcctttttctaatgtttaaagaaataaatttaaggaatcattcatccttacacaaactattttacagtctcacagtttatagtatagtcttaaattgaatacttttattgttaaaatagaaatgaaataaaagctaaaaaaatatactaattattaagtttttaagcttataatgtatacaaggatataaaaatagattggggatttgatgagtttaaaagaggttttaaatagtaatcggcctgcagagtcacgacaattagcgtgtgcgttaactttttgtgggggatttattgatgcatatacatatatccagagaggacatacgctttccgctggacaaacaggaaacgttatcttttttagttcagcattagctgatcataatgttcctggaatgattaatcgagctagtacgtttattgctttttctttaggattgctattagtaggactttttcataaatatgtgaaaagtcactattggagagtattttgcttatttccaattttagcgatttgtattgtagtgggctttttgcctaaaagtgttcctaattattatattgtgcctgctattgcgtttggattggctattcaaaacgcatctttcagcaaaattgaaggcatgggttataacaatgcatttacaactggaaatttaaaaaaatcggttgttgcatggagtgcattttttttggtgaagacaaaagtaaacatacagctgccgttaattatatgatgttaacaattgcatttgcagttggagcaataatttcagctttactgcaaaaattattggtattaaaaactatttggattgcagtcatttttttaacgacgattaatttagtttatatcattgcattgagacgaaataaaaaaattgatttttcaaaatgattttaaaagcacttgtcataattggcaagtgtttttttgaagaggttgtgagtgagaagaaagcgaccaatctgaaaaataataattttataagtgtgcgtataattaatattatgtaaagccagattgaaaaacaatcaatttaataatagaagtcataattaatttaattgtttcagcaaataagtcttattttggatttgttaactcgaattcagagactgtaaaatagtttgtgtaaggatgaatgattccttaaatttatttctttaaacattagaaaaaggagttcctttctcgtatgattggtttgaacaaaaaaacacatacagaaagaagaactccttcatgaatgattttaccaaagattttgctcaagctctattcaatccagacaaaataaatgatttattgcgcaaagagctacaacaggctgttaataacttgttagaagctgaattgactgcctttctgggctatgatccctatgccagaaatggctggaatactggcaactctagaaatggtgcttatttccgcaaagttgatacgcaatttggcccaattgaagtgcaagtgcctcgggatcgcaacggtcaatttcatcagcacacgctgcctggctacaagcagcactcggatatcttggaaagcatgattatcaagctttactccaagggcgtgaccaccagggaaatagccgatctaattgaaaagatgtatggcagccattacagtccagctcaggtatcaaatatttccaagcagatgattccaaaggttgaggcttaccacaaacgcaagctaagcgacaagtttttctgcgtctatttggatgcgacataccttcctttgcgccgagaaacatttgagcgtgaagcagtctatattgccattggcatcaagcctaatgggcacaaggaggtcattgactactgcattgcgcctagcgagaacattgaagtctggacagatatgcttcaaaacatgaaatcccgaggcttaaagcaagttgagctttttctttctgatggtgttgttggcatgaaaacagccttggccaggacttatcctaaagctcattttcaacgctgtttggttcatgtcatgcgcaatatctgcgctaaagtacgcgtcgacgatcgtgaaaagatcatgaacgaattcaaacaggtgcatcaacagacaaacaaagaagaagccacagctgtcctgcatgacttctataccaaatggggcaaggtttacagccatgttatcagaagcttgaaagacatagaaccagatctgctggtcttttataactatcccaagcagatcagagcttcaatttattcgactaacatgattgaatcatttaacaatgtgatcaagcgcaaagctaagcctaaggcagagtttccaactgaacagtcgcttgatgcttttattggcattcaggcaatgagctacaatgaccgttatttcaatcgaattcataaaggctttggtcaggttcaggacaccttagaatcctactttgattaaataaataattaaaaaatcaatttacgagaaagaactatttacacaaaagatttgacagtttcctgaattgaataatatgctgacaataatcaataaaacaaccttcaaagagaagtattttgaaacaattatggtaaagtaattctaattaaaaacaatgaaaatagttgagtaatatttgctagttttgcctttagtatctataaagccattttttatttttatgctatagctttctttaaaacaaaaattttaatgatcgctagataaacctatctcgcaaaagcctaattttggtaaatttgtgcttttgttatttttattgttttaacgttttgtatttcattttaaattcgtaaaaaaatattttataaattctttgctctttttgctacatacaaatcggtattaagtgcttttatatttattcttattccctatttttaagatttgctgcaataatacacatattgaaatttcttaaataaataatcaagcggtaaaaatgataattctactaaactcatgactcaagtcgctacttaaatctgtgtttttacatgaataagacatctaaataaagtttcaatcttcaaaaaatgctgagaatcactctaagatttctttttaatgaattaatttatcgtggttactcaatctttatacaaacaagcaacattttaattcattattatacctctatctcccctcctctgctgaccagggaagacgaaaaaagagccgaaatcagacataattcgtccaatcaggctctttgcttatctagctagaataaaaatctgaataaactcaatctgttgcaggtctaattttattcataatgaaggcaacgacgattaccaagataactgcacctaaaattgacggtacaattgccatgtccgcaaccttcggtccccattcccctaaaagggcttggcctagtgaagatccaaccaatcctgctaaaatattagcaatccagttcattgacttaccatgtccagttaaagcacctgcaattaagccgattactccaccaacaattaatacccaaatccaatgtagcattttgatcacatttgctttcttgcaaaatatcttatcacatttctgattaaacaaagcgctttctttaactatctttattttgagactgtaaaatagtttgtgtaaggatgaatgattccttaaatttatttctttaaacattagaaaaaggagttcctttctcgtatgattggtttgaacaaaaaacacatacagaaagaagaactccttcatgaatgattttaccaaagattttgctcaagctctattcaatccagacaaaataaatgatttattgcgcaaagagctacaacaggctgttaataacttgttagaagctgaattgactgcctttctgggctatgatccctatgccagaaatggctggaatactggcaactctagaaatggtgcttatttccgcaaagttgatacgcaatttggcccaattgaagtgcaagtgcctcgggatcgcaacggtcaatttcatcagcacacgctgcctgactacaagcagcactcggatatcttggaaagcatgattatcaagctttactccaagggcgtgaccaccagggaaatagccgatctaattgaaaagatgtatggcagccattacagtccagctcaggtatcaaatatttccaagcagatgattccaaaggttgaggcttaccacaaacgcaagctaagcgacaagtttttctgcgtctatttggatgcgacataccttcctttgcgccgagaaacatttgagcgtgaagcagtctatattgccattggcatcaagcctaatgggcacaaggaggtcattgactactgcattgcacctagcgagaacattgaagtctggacagatatgcttcaaaacatgaaatcccgaggcttaaagcaagttgagctttttctttctgatggtgttgttggcatgaaaacagccttggccaggacttatcctaaagctcattttcaacgctgtttggttcatgtctgcgcaatatctgcgctaaagtacgcgtcgacgatcgtgaaaagatcatgaacgaattcaaacaggtgcatcaacagacaaacaaagaagaagccacagctgtcctgcatgacttctataccaaatggggcaaggtttacagccatgttatcagaagcttgaaagacatagaaccagatctgctggtcttttataactatcccaagcagatcagagcttcaatttattcgactaacatgattgaatcatttaacaatgtgatcaagcgcaaagctaagcctaaggcagagtttccaactgaacagtcgcttgatgcttttattggcattcaggcaatgagctacaatgaccgttatttcaatcgaattcataaaggctttggtcaggttcaggacaccttagaatcctactttgattaaataaataattaaaaaatcaatttacgagaaagatctatttacacaaaagatttgacagtttctttattttaagcgaatgaactatttcttgtcacttttaaaatatattatttgactgtcttatacttttctttagatttggggcatatttcttgccacgactaattctttattttttgtctattgtatatctcaatttgatttcaatttttttcggtttgattactgatatattaataaatgatctcatctattgccttttgagaactatatctgtagtctataaagtataaattatgtgagagatatagataagattctctccactaagtatggaggacataaattgtttaaaaggaaatcaattattaaattagcatgtgcaactatgttaacgaatgcaggtgtcacacttttatctcaaatgactcgtttctctgactcagagagcattgtgcaagcttcatcaacatcagttgttgctaaagcccttggaattgatgttgccagctaccaaagcgcagatttaactgctcatgccaaggctggttctcaatttgcaatcgttaaagttagtgagggaaccagttatcgcaaccctaaggcagccaatcagattaaatctgctattgctaatgatatgatgccgatggcttatcattttgcaacttttagttcaagttcatcggccgctaagcgcgaagcgcaatacgcaatttcttctgctaaggcgttgggattaccagctggctcatacttagcctgcgattatgaaactggtcagggcaatatcattactaatggtaaaaatgtgacagctaaggctattattgcctttatggatcaaattaaggcggctggctatcaaccacttctctatgctagttcttccgttttgcaaaacaatattaatactccatctatcgtgaacaagtatcctaattcactctgggtagccgcatatgcgatttcaggccgagtagaccaacccaactttaaatacttcccttcaatggatggtgtcgcaatctggcagttcacagataattggcgcggaatgaatactgatggcaatattacagtcttgccattatcaatcgcaggtaacgcggcagtttcacaggctcctaaggcttccaataccaagaaaacagctacagttatgtacaagtcatatgtttatgacaaaaatagcaaccggacaaatgatttttataatgcttacagctctattgcttattatgacaataaggtgagaattaaaggcaaatcaatgattcgtgtcggtgaagacaagtatgtgatggcaagtaacgtactaggcaattcacgcgtctttaaagctgatgctaaagtgtataaaaatgatggcaccattaatacaaaatggtctactaaaaaatccggttcaccgatcaagacttatggccctaaacattacatcaataatgaagcttactatcgaattggtaaaaatgcttacgtcaaagcagacaagttctaatttatttttagcagcaaatatttgctgcttttttgatgcatccctaaaacgtaaatgaactgacaaatcatttccaatttatttatctgcatcccttttttatccatgttaaaattaaggcattatatagaaacgaggataagataaggatgaaatttaaaaagaagttagctttattcttaggtctgggagtattattgctttctctgactggttgtagtgattttcaaaactgggaattatctatgcgctctaagattggggcattgcccttaacagtatcaacgtatgattctaatggacaaaagatcgaccagatcaaagctaagtcagttaatattcatactgataaaaagatgtcacagaaaagtagtaatggcactgaacattctagcgtaattgatgttgactatggcaataatcgaatgattcacgttggttctactatgattgcctatgaaggactgaaaaactacgaggatgcatttaacaaaaaagttaagatcgacgatcaaaatcgttctgttcctctgttaaatacaatgtatcagaattttaaaaacgattggaatggtagctcaagagtagtaatgattagaagccaattaggaatgccgattgctgtctttattggaaatcacgtctcaattcataagagtgatatgaagaatgcaactcaatttgtgattgatggtcatcgtctatttgtttaccgtgctgattacacagtttatccaatgtccagtttaaaaagcaattaactataaaaagtgtcaatcctcattttaaggactgacactttttattatttatcatcaattaatgcattaaatgcttcattagtttcaacgatgtcgctcattacttgattaatccagtcattaagcttatcgttatcgtagttttctaaaccgccttcggaatctccaatgtccgcaataccattattgaaatctactagttcagtaattaacttttgagcaaaaatcttagtggtaccaccaaagtttttcgcaaaattatttacatccccatatgcatcggcaatatcactgaaaactgtgacagttttaccaaaagtctcactcaagttatctacatctgcttgagttggtacagtcaattcttcatcttcattattaagttgttcatctaaacgaacgccaatgtcgtttaacactaagtgaccatcatatagacgattcagtaatttgataccactagggtttttagcttggaagtttacactaatttcttctgtcatactttttcctcatctcacataatgtattttcatctattgtacaatttttagccaaaaaatacgactaaacaaggaaaataagcttttttcgattctttataaaaaatgttatattttacttgaacattagcaataaagagcataaaataaacgattgaaaagtgttgtaccatacaaacaacatatgtttgtaagtaatgtttgaattactaaatgtaatttgcccttacttactgacgagcaatcactgttgctataattagaatgctaagagttttctataagcgttgctggtattctagttatagtgacatgattatctaagttaaatttagttgcaatcatttttctacgttagtactatagatattcacgttcgaatgagcgcagtaattttaaattagactgttttttatcacctattcctgagaataggtgatttttttatgattaacgtatttgtatgatataatataaacattagttcgcaaaaggagtagatatggaaactgctaaatacctagaattgatccaaattgaagtaaataaattgcctgattttgttaagcaatttaatcttggtactaatcattcattaactactacttaccagtacttaactgaaattcgacgcttcttcgattggctacgtcaagaaaatatctcttctgcttcagataatgctcatgttactacggatacattagccaacttacgtcgcaatgacataatgctgtatattgattatttaggacatacccgtaataagcaaggccgactaaactcccccactacgattaatcgctcaattaatgctttacgctccctatttaagtttttaaccattactgccgacaataatcatggtgagccatattttgaacggaatgtaatgcttaaaattaattctttaaatgatacgcaaacacttaattatcgggctcatgtacttgaaagccacatgtacactggtaagttaaaatttgaatttttgacttttattgatcaggactatattaaccattgtaataagcaagcaaagattggttttaagcaaaacaaagaacgtgacatggcaattgctgcattaatcttaggtaccggcattcgggtgtctgaatgtgctggcgttgatttgagtgatttaaaccttaaggatgctgtactagatgtaactagaaaaggcggacaaaaagatagtgtaccaattgcagaatggacacttccttatatcaagcgatataaaggtattcgtaatgaacgctatcatgcagatagtaagcaagtggcattctttttaactcaatggcatggtcaaacgcggcgaattacaactaatgcaattgaaaaaatgatcaataagtattctgcagcttttggtcatccccttaccccacataagttacgtcatacggttgcttctgagctctatgaagtaactaaagatcaagtgcttgtagcacaacagctaggtcaaaaaggcacttcagccaccgatctatatactcatgttgatcagaaaaaacagcgtgcggctctcaatgagatctcaaaaaaaaatcacgattaatcaaattaaatgcaaaaacgagtttggctattcaattccaaactcgttttttattaatgtttcaatttcttgtaagcttttttggagccacgatctagatcacgattaaacttataatcttgccagtctttaacaaagagtaaatctaagttatatccttttgggtacaagtctttagctagtcgtcttaattgtaaacgtctgagtggtacttctacaaattcttttgtcacaaatatctttgctgcattttgggtaggaagatatttataaaagattccttcttcttttaaattggtagcatatacaatatcacctttatgaaattcttttttaacaaccaggttgcttttgtttttccgctggtgaacgaaacgtttttttaaagataaaggtaaattattgcccgctaatatggcttctgcttgatgcaaaacattttctggaatacctgattttttggcgatccatagtgctcgactattaccaatacttcctatctttaacttataagtaggttgcagattttttaagtcaaaatccattgcagctgtgataaaaccatcatgctgcttagcaaaatccttaatagagctgtagtgtgttgtggccatgattaaacagccacgtaaatacaactcttgtagaataccaatagcgagtgcgcttccttcatttggatctgtccctgtccctaattcatctaataatactaaactatggaattgagcatatttggtaatcatggcaatatctttcatttcggctgaaaaagtactcagagaattatctaggtcctggtgatcacctattaaagtaaaaacgtcatccattaatggaatatcacatggtttatcgcttggtaaaaacagacctagttcggtcattaaaatcatcaagccagtagttttaagcgcgacggttttaccaccagcatttggtcctgtaatcattagaacactattttcttgggttaattctaaggttaacggaacaggattaatgatcaagggatgccgcactgcacgtaaaacaagagaattttcacgattaattttaggcctaatacaattatatttttgtgcaaactttcccctagcaaaaatcatatctagtaaagtgattagttcaatgttacgcttaatatcatccttcacgtcgtatatttttgcagttaaagcacctaagattgctagttctagattacgtatttgtgcctttaaattggttatttgctgatttagacgaacaaccttagcaggttgaaagtagacggtttgtccaccattagaaacagccacaatagtccctgacaattgatttttgtagtttgctttaattggaatggtagcgtagccctctttttcaacgatcattgcgtctctaatcattttttgattaggtttactagtcaaaaaatgatttaatgcagttttgagttcagtaacagatttctttaagtcgcggcacatttttgctagttcacgatctgcctcatcgcgtacttgaccatgttcaatagtagtataaatagcatcttcaatgtctggcaatagcgtcatgtcttggacatatgcattgagtaatggtgctagctgctcatgtctggctaaaaagcgttgtagtaggcgatttactcgtaaaaattctgctactttttctagatcatcaggagttaagattagtcctttttcagctttagtaattaaatgctcgatatcctcagaactggcaaaaggaatgtgctgccgtaatttcaaaatcttcacggcttcttctgtttcattaagcagttgttctactttatgtaaattgctacttggttggacggaacttaattgttctttggcagcaatagtaattgcctgttgagctaagatatctttaacttgagtaaagtttaagttttgattattgttgatatttttcaatttgatgtaatttccttatgtttaatttaacgctgattgtaactaatggcttaataagtatgcttgcagacatatgcatttcctcgaatttctataatttgatttaaaaatgattgtaacataaaaagaacattaaaatatatactatagtaaaacagttattaaattaattcctatattttatgataaccatattactattgcctactatagcaattttgaaactgtcaaatcttttgtgtaaatagttctttctcgtaaattgattttttaattatttatttaatcaaagtaggattctaaggtgtcctgaacctgaccaaagcctttatgaattcgattgaaataacggtcattgtagctcattgcctgaatgccaataaaagcatcaagcgactgttcagttggaaactctgccttaggcttagctttgcgcttgatcacattgttaaatgattcaatcatgttagtcgaataaattgaagctctgatctgcttgggatagttataaaagaccagcagatctggttctatgtctttcaagcttctgataacatggctgtaaaccttgccccatttggtatagaagtcatgcaggacagctgtggcttcttctttgtttgtctgttgatgcacctgtttgaattcgttcatgatcttttcacgatcgtcgacgcgtactttagcgcagatattgcgcatgacatgaaccaaacagcgttgaaaatgagctttaggataagtcctggccaaggctgttttcatgccaacaacaccatcagaaagaaaaagctcaacttgctttaagcctcgggatttcatgttttgaagcatctctgtccagacttcaatgttctcgctaggcgcaatgcagtagtcaatgacctccttgtgcccattaggcttgatgccaatggcaatatagactgcttcacgctcaaatgtttctcggcgcaaaggaaggtatgtcgcatccaaatagacgcagaaaaacttgtcgcttagcttgcgtttgtggtaagcctcaacctttggaatcatctgcttggaaatatttgatacctgagctggactgtaatggctgccatacatcttttcaattagatcggctatttccctggtggtcacgcccttggagtaaagcttgataatcatgctttccaagatatccgagtgctgcttgtagtcaggcagcgtgtgctgatgaaattgaccgttgcgatcccgaggcacttgcacttcaattgggccaaattgcgtatcaactttgcggaaataagcaccatttctagagttgccagtatttcagccatttctggcatagggatcatagcccagaaaggcagtcaattcagcttctaacaagttattaacagcctgttgtagctctttgcgcaataaatcatttattttgtctggattgaatagagcttgagcaaaatctttggtaaaatcattcatgaaggagttcttctttctgtatgtgttttttttgttcaaaccaatcatacgagaaaggaactcctttttctaatgtttaaagaaataaatttaaggaatcattcatccttacacaaactattttacagtctcgcaattttactataacattcagcactagtatctcaactgtaatttttaattacaaatctattatcgtaaaaagggtaaacaaaaaagaccatagtttgtactatggtctatggctatttgttcttattttaattcgagcttatcaatatcaaccatccatgcaattgcaattgatttctctcctaagtgtgtagcgattactggactaaattcagctacatcaactggcttatctggaaagttttcattaacaaattgcttaatttgctccgcttgctttaaatcatttgagtgaaatacaaacaagcgtagcttatctttataaggcaaatttgctgtcttctctaaagttaatttttctaccttagaaacagcacgctttaatgatctgatcttatcaaaagcaacgatttttccttcatcattaaaagttaacaaaggcttgatttgaagcattgtcccaataaaagcaccggcattgcttaaacgaccaccacgacttaagtttttaagatcatctactacaaagaattcatcaattgtcttacgtatctcatctaacttctttaagatagcctctggttccataccattttttatcattcttgcggcagctaacaccaagtagccttgcaatctaactgtcatcttagaatcgtatggatataaattatattcaggattgttatgtgccatatttaccatattttgataaaagcctgagataccactggacaaagtgatagcgataatagcttcatagccttctccgtgtaatttattacataattctatcatttgccccatgctgggctgtgaagttttaggaaaagcagcaccttgtctctccatctcaaaaagctgggtggaagtgatattaacgccttctgaatattccttatcacctacgatgacaggaataggaactacattaatatcattatttttaacttcttgatcagttaagacactagtactgtcagtaactaatgcaattttcaatttattaacccttcccatatctaatttagcatagaaaaattatagcataaaaggcacctatcacgcaccctattccattttttctagggtcatagaagtatcagcgacttgatttaattgcttaataaataaattagcagcatctctgtcaaaatagacaaataataaattctcaatcttagtcagagttttttttagttctttagctttagtcacgccagcttcacttagattcacaatcttgcttgaatctttttccgatctagtgatattaataaagctcatagtcttcttttgctgcaattgacgacttaaggttgataatgaaatattaagcgcttctgccagcttccccatcgctaatgcttgatttttgttttcatcaaaaaatagcaaaattcgagtttgtgaaatatttaagccgcatttgtgatttatttcttttttcacttgatctgcgatcgtactaaaaaataatacatccattcgtatagtcctttttctccaatgtagattactatatacttgtattttatcatttaatatggcatttgataataccaaaaggctaatttatcagtaatattgtataatacaatgcactttttatgttgtaatatacaacttaatgatatagcagacctcgcgtgaaacatttactactgtattgcaggtttcaattatgattagctataacttataaatataatcattttagaatctgactaaaaattgatataatattacacgaactttgaggtgatatttatggcatttgatggattatttatccatagtttattaaaagacttagtccctactctggtaggtggtcgcttatcaaaaatttatcaaccatttgatcaagatctagtcttaatttttagaaaagatagaaagaattatcaatttttaatttcggccaatgcacaatatccaagaatgtatttgactaaacaaaacattgcaaatcctgataaagcacctatttttgtcatggttttaagaaaatacttagaaggttcagttttgcaatcgattgagcaagttggcttaggtcgaattgtcaactttcattttagtaatcgaaatgaacttggtgatcaagtcaagctcatgctttctgtagaattaatgggacgtcatagtaatgtcatcctttataatcaagaagacaatcacattattgatttacttaagcgaattaatcctgatgaaaatagagcgcgtgttttactgccaaaagcaaaatatgagttgcccccactaaaaccaggattaaatgggttgactctatcagaaagtgaatttaaacaattaagtagtgaaaaccagcctaatgaaattgctcaaaaaatggatggcttagataaagatgatcgaactgaattattaggctatcttgaagacgattacacttattcatcttttaagaccttttttaatcagtttgacaatccgcgtgcttttattttaaaaacacctagaaataagcgtaagattttttgttatttgccctatcatttagatttagagaaagaaagctctaatccagatctgaatgctggcttagatgaattttatgaatatcaggcaacacgtgattgggttaagcagcgtgcaggacaagttgaacgtgtagttaagaatgagcaaaataaactaactaagaaagttaaaaaacttgagaagcaattagatcttgctgaaaattcagagggctatagaattaaaggcgaaattttaaatgcaaatttggctcaagtaaaacctggaatgactaaagtttcattacctaactattacgaaaataatgctccattagagattaaattagatcctgctctctcccctgctcgtaatgcgcaaaagtattttactcgttacaaaaagttacgtgattctattaagcacattaatgaacagcttcgtattgctaaggatgatattcgttacttggattcaattcaaacagctattgacaatgcagatccacaggatattgatcaaattacagatgaattgattaatcaaggatatttacgtaaacaaaagaaaaataagcgtaggaagaaaatcattgaacgcaatttaaatgaatttaaactttcatctggtaaacacgtattggttggtaaaaacaactatcaaaacgattggcttactcttaaaaaagctaataaatctgattactggtttcatgttaagaatatgccaggctcacatgtgatcttacgcgatgatcagcctactgatcaagatattaaagaagcggctgagattgcagcttacttttctaaggctaaaaattccgctcacgtacaagttgattatgtgcaagacaagcgtgtgaaaaagcctaatggtgctaaaccaggatttgtaatctacactggacaaaattcaattgaagtaactcctgaagaaaaggaaattatgaataaaaaaattgaaaaataaaaatcatcgaactagttagttcaatgattctcataaatgcaaagtcatatcgactttgcattttgttttgcttattaaataggttgagtagttaaagccaatgattctagaacgtctaaaatcaattccgctgtttcgatacttgagaaaacaggaatatgtgtattcagcgcttcatctctgatgcgcgatgcatcttcgctagctgcatcagacaaattagtaatattaacaaccatgacgatcttatgttgacgaattttatctagtagatttctagggtctttatgaaccttctccactactccagtagtaatcccagcttccgcaaacatattagctgttccttcggtcgcaattaatttgaaacccaagcgatcaaatcggcgagctagttgggtcacgcgattcttgtcttcatctctgactgaaataaagattgttccataacttggaatatgtaaatcacttgcttcatatcctttgtataaagccttagctagttgagtatctcgacccattacagaacctgaggatttcatatttgaatcgaaagtattaccacttgaataattaagaaatgaaaatactggcattttaatatgaataaaatcgctgttttgccatagaccattaggatatcctagctctgctaaatttttgccaattaaagcttctgtagcacaagtagtgatatccttatctagtgattttgataaaaatgctacattatgacctgcatatggtttaatttgcaatagatataggtcattatcaacgaataaatagtgcagattaaaaataccttttgttttcagctgcttaattaatttaattgactcttgctcaatctttttttgctgctcttcggttaaattttgcggctgaatcactgcaattgaatcagaggcatgcgaacctgtttgctctagatgttcaattataccgggcaaagttacattggtaccatcagagatagccgttacctcatatttgtgtccctcaataaagcgagaaatagttatttgatcaagatgattttctgctaaatatttctctattgcaggaacatcataaacaactgcagatttttgcttgttttctttattcataccaccaattaaaagtggaaaaccatatttagaagcaaaagcgaaaacctggtctgtatcagttgttttatttaatgccgggacccgctttaaggtagtagattgttgatcaagcaaagtagtaatcttatcccgcggatcgtcgtttgccttttgcccaataacgtgcaaaccacatttttccaactctttactcaatgcactgattcttttgccagaaaattgaactaatacatcagaaatattttctcttttagcaacagttagaatattttcaactgtaatggaatcaaaataaactcggtcaatattcttataccttgatgaaatcgattcgtcattatttgatagaagcacagtaacatagccatacttatgtaaagtatcggccgcgtgagcaatcatatagtcaaactcgctagtaaccgaaacttgaagcggcaacatgcccaaaatcaagatctttttttcagcatttaaagcttgtgcttcattttgaacatcatatgcactgtagtaagcacaaacattaggtttatatatacctgctgagccgtcgatcttcaaatatgatggctgcaagtcaattttattaatcaaagagcgaacttcagtaactgatttttgtaaaatcttagctaataatgggttaaagaatccatagactttagcttcttgcagcaaatcacgcgaaggctgctccttctcttgtaataactttttgccaagtcttacaatgtgaagcaatttctgataataaaccggatgcaaatgtgttactttttgtaattcagaatatggaatatcttgatcaattgcggctaataatttaactaaatgcaattcatcaggatgtgccaaatcattcaaaatatctgcagtggatttttctttttcttttataaaagcatgccaacccaattctaaattaatagttgcatctaagcctttcagaaaagcagtttcaaaattacggcctacacccattgcttctccacttgcttgcatgcgacttcctagcaaatagtggttatagccggattcagcaaatgaccaatatggcattttaattgctactgcatctaaggtgggttcaattgaggcattaagtccagatagaggatcggtaatctcattcagtcgataaccgatagcaactttgctaacgacatatcccacatcatacattccaattctttgagcccaaacagaacttcgcgtcaaacgcggacgaatcgtcaaaagcttagatcgaatttgagttccatggtgtttaatcgcaaaatgaaaactagcaaatccaatgagatcaagattagacatgatttttctaacggttattcttaactcttgaatatgatcattgtttagggttaatgatggcatcacaactgcagagtcacctgaattaatacctacagcttcaatagatcccgcaaaattgataaaagctaaattgccatccttatcacggattacgtcaacaattacttcttcccaactagataagtcttcagttaagcgataattcttccatgtaaaattatcattttgcttttcttctttaaagtaactgattaaatcggtaggatttgcaaattgcaaatgttcgttgtgtacaaaacggttgtacttagtaactaatacgggaaaagtgactttgtcgttaatgctttctagcgcattatctaaattatcctgaatactctgattaagttcccaagattgcccggtatcaatatgtagcttagtaagcaactctgtctttttctgttgattccccatttgtagagcacgcgaattcaatgttagtaactgaattcccatttgttctaaaacgccatcttgtaataacttatgtgcaacctttaaaccattagttgaaccataagctgtcataattgcatctggctcttccatccgtagaattcttttcaggaagtcgagagtcatcggttcaagatagactgttacaccaagttttttatcagttgaaattgtagctggattaggattgactagcacaacttgaatgccttcttctgtcaaagcatcaattgcttctgttgccataagatccatttctgctacactaccgattaaagtagggcctgatccgataattaaaactttatctaaatcgttttctaatggcatataactaccccatcatctgtaaaaaataatcaaaaatttcatctgcatcattagtgcctggtgctccttcaggattaaaagcagtggcgatcaatttgtccttactgttccagaagcccgccatcagttcactgtgtagatcaaagtattcacgattcatattcatcttcacactatcaggcaacactagttggtcaatattcatcgctgtttgccagatagcattactattttgttcaatcactggataattaataccatcaaattcttgtggtaattgaaccagttcaaagccgagataatcgctcaaagttaaaaaacctaatccgattcctaaaattggatacttaccataaaaatgatctaaaactggcgttagctgattaattacttcttctggttttcctggcccatttgaaataatcattccttcaggacgtaagttttcaatatcaatcggactggcactgtatggtaaaactgtcgtatttacttttcgtaaagataaagcacgcagcattgagtgctttagcccaagatctagcacagctacagttcgtccaacattaggggatgcatatgcattcttagttgaaacagtcgcagatttatttttaggtaaaactagtgctttaatctgatcaaaggcatgctcgtcattagtatccatgatcgaagccttaattgtaccttcttccattaagcgatgaactaaagcacgagtgtcaactttgaaaattgcagggatgttcttttctttcaaaaaagaacttaaatcttcaaaattttcactatctgaaatatttaatgcaatatcgttagcaataatccctttaactacgggatcaatactttcataatcaatggcattaataccgttattaccaatcattggtgaagtaaagactaaaattttaccagcattagtaggatctgttaatgcttcttggtagccaaaattagccgtttgaattgctaattcaccggttgaaataatactggcaccaattccttcacctggaaatgaactgccatcttctaaaatcaaataccgtttcatattatcacttacttgtttgttctagttgagccaacgtttcttgaaaaatttgtggtggttctacactaaactctagccattcgccagtacttggatgtttaaatcctaatactttagcatgcaaaaattgaccatgacctttcaaggttttacgtggaccgtataatgggtctcctgcaaccggatgtccaatatagtcaagatgaactctaatttgatgggttcttccagtttcaagctgacactcaattaagctataatccttgaactgctcaagcaccttgaagtgagtaatagcttttttgcctgtttcaactaccgccattttcttgcggtcatatggattgcgaccaattggtgcatcaattaccccattttcttccgcaaaattaccatgaacaattgcccaataaagacgtttgttagtcttatgagccaattgatcttctaatgattcacgagccttggcggtcttagcgatcattaataaaccagatgtatctttatcaatccggtggacaattccaggacgaaatccttctggtgattgtgctaaggccttggtgtgatataacaacgcatttactaaagtatgatctggatgacctggtgcgggatgcactaccataccttgaggcttgttaactacaatgacatcatcgtcttcatacacgatatcaagtggaatattttcgggtataacatctaacggtttaaccgctggaatattaacttcgattttatctcccgcctgaatcttataagatactttttcgactttgccattaactaggatattttggtctttaaccagttctttaactctagttcgagatagatcaggaatttgttctgaaacaaacttatctaaacgtcccttttcgttttttacttcaagtgaatattctttagtcatgttgttcttccttaccttcaataaaaattaagtaaatgaacacaaggattactccaacagtaattgcggaatccgcaatattaaaaatgttgaagtgaacaaaatcaagctgaagcatatcaactacatattttaaatgcaaacgatcaataaaattaccaacaattccacctaagatgagggctaaacccacatcaaacaaggtattcttgtactttttgttaaaaagaaaatacaagcaaacactaatggcaataatactgataatgtaaaaaagccacatttgaccagttaaaatgttccaggccgcaccattattttgcaaataattaaaggaaagaagcccaggaataatctggtgtacttctcccacagcataatgggcaacaatataattcttaagtccttgatcggcaagaaccacaactaatgaaataattaaatataaaaactgcatatctttttagaataatccgctaattttaccattgttatcaacatcgatatctagggccgcaggatgcttaggcaaacctggcatatctagcacatgacctgtggtaaccacgataaaatgcgcaccattttttaaactaatccctttcacatgaagcttaaagtcagttggagcacccaattcgttcttgttgtcgctaaatgaatattgggtcttggcaataattactggtaattgggccttacctaactttcttaattccgcaatttgcttttcagccttgtcactatattcaactccagctgcatgataaatcttggtagcgactttctcaatcttgtctttaacatcgtcatcatctgcataagttggagttaaatctgccttgccagagttagccaaatcaacaacagcttgagcggcttctacaccacccttagaaccttcgccatgataagtaactacttcagcattaataccttgttcttcaattaattgtttaagcaaagcaagttcttggtcagtatctgaagcaaaacgattgattaacacgatgaccggcacattgtatgaacgcatgttgttcatatgacgctcgaggtttttaaaaccttcttttaaagcatctaggttttcttcatctaagtgatcagttgagcctaaagcttgatacttcaatgcacgaacagttgctacaactactgcagcatcgggcgtcttgtccagatgtcttgagacaaagtccatgaacttttgcccaccaagatcactaccaaagccggcctcagttaatacatagtcgcttaaatgcaaagccaagtttgtcgcaatgacggaattggctccatgcgcgatattagcaaaaggccccccgtgcactaatgctggtgtgtgttccaaggtctgtactaagttaggcttcagcgcattagacaatagtgcagcaattgcaccttggaatcctaactgtttaacataaaccggttcatcatccttagtgtaaccaactagcatgtcaccgattctactctttaaatcgttaatatcagttgccaagcagagaatcgccatcaattcgttggctacagtaatggcaaaactagcttgatgttcaacaccattaaacttggagccttgaccaaccgtgatttttcttaaagcacggtcattaacatcaagcccacgcttaagtaaaattcggtcaggatcaagatttaggctattgtcttggtagatgtagttatcaactaaagctgcaagtgtgtcaattgcggcagttaaagcatgcatatctcctgtgaagtgtaggttgatatcttccatagggatgatttgtgctttcccaccacctgtagcaccgccttttaatccaaaaacaggtcccatcgaaggttcacgcaaggcgatcatcgtattctggtgcaactgattgtgaattgcatcccccaagccaattgtaatcgttgacttaccttccccagcgggagtaggagaaattgacgttactaatactaatttacctaactttttactagcacgagtcctgttaatggcttgccaagtaatcttagccttatcatgaccataaggttctaagtcttcctctttcaagcctaccttagcggctatttcattaataggtaattctttggtttcttgtgcgatttcaatatctgatttcattattgcttattcttctttctagacatcattaaaacagaatagctttggtaatcactttttagttgataaacttgaaaattacgccaacttgaaagcaaagtcatttgattgatttttacttttgaacgatatggcaacttgagtaatattttgtctccacccttttgcaagtaagaaaaggaccaagtataaactgctaaaagtaagaaaatgataccaactactattccaggtatactaattgctttgttcccttcatagcccaaaataaaggcgataaatagaacgattaagagccaagaataatagataattcctgcaactcctagaaacatgaaatgccgtttagattttagaatttagatcacaccctatttatttaatcatgtctattgtatcaaagatttaatcaaaataagagggttgaacttacagcaattaaatataagtccaatcctctatcacatttatttactttactactgctatttcgtctctaacctttatattgcttgaatcgatgccaggtttttgaccgtgaagattaaagtctaaatcaactgtcggttgaaacagtaaatgtactcattgaaagctcagtagccttggtatttttcgctgcttgaccccatgctctcaatactgcttcgggaattcctttagcattagtcaaatttacgttacttaatttattaccaacatggccgaaggaatcaccattatcaccaatattattaccaaagtttacattgcttaggtcaatattggataaattactatcgccatcgaacaaactagcaatcgatttagcattagataaattccaaccactaatatttacagattcaagacttttatcatgaccaaatgttgcataaatattagtaacacgacttgtatcccaaccacttaagttaatactttttacatttggaatactagaaaataaaagtttcagattagttacattggaattcaaagttgtagtagttaaatcaatggcagttgcatttggttctttattgcttgaacgtatccattaactatttctctagtaatgttgcgggcatttgttagatcaacatcagttaaggcattattatgtgcaaaaaagttccaagcgtttaccacatttttgtatacagtatcgcttagatcaactttcacaagcttttcagcgccactaaacatttgtgacacgtcactgaattgacccatattccagccagcgatgtttacattttcaagattcttgtcattttgaaacatagatctaattgcagtggcttcactaacatctaaatgacttagatcagcagactttaaagtgtcactgttcattaaggctgcggtcatgtcacccttagcataaactttgttcttatctccctcactgtcaatagtaatgttaactgcacctgcatctttgatagtttctaataagtctttagtgatatagactttatcatcagtagttattgttcctgcattgataaaatcttgggtattagggatgtaaatatttttattaccagtacccttatatttagttaaagtgtattgatgagaattttgatctaaacttccatcccaatctgcagtgttgtactgactattttgagtggtgttagcttgtgtcttactagttgaagctactgtagtagcttgcttattggtagaagtcgtactctcctgcttgttttcattagtagctatcttgttcttactttcaattgatgatccgacatttgagttatcatcgattgaattgttcttagtagttaaatcagtatttgaaagatcaactttgttagtcgattttgtcttcacaatactagtagtgtcttcagttttattggcaccatttgtatctacattattagaagttttagttgtggaagcaacttgctctgtagtagtttggtcctttataacactggtagtagcactatcagatgaatttgcatcaacactatcagcatgtactgtttgactagagtaactcataaaagtcaatccaattagtacagaaactgcaccgattgttattttacgaattgaaaaacgttgtttaatagaatcaatattattgtttctaaggaaatatcattaataaaaaatgaccgagaaattaatctcagtcatcttcttatcaataagggtatctcatttctactaccctactcgactagtaccattagcataattcaaagttacgccatcttgcacgttgaaaatgtaaatattgaaatgaactgcatttgagttaaccgactgcccttccatttcaactccgcgagccaatagttcattgccacgaaagaccggtgtcacacggtagcggacgtagttgcttcgactttcttttacataatcagcaacctgatcctcatagcgcaacatatcaggatcatttagctgccttgtacctgtcatcaaatttttaatgttgttgttctgtcctgttagctgataaccaatcaaatggcagcgattatagagccagccgccagcaactcgtttattatgccaaccagtaggatcaacatgtagtggttcgcgtctagcgcttggcatcagcgactgaataagcaatgcgtttgcggcagttacccgattcaaaccatcgaggttaccatattcttgccatgctccgcgattagtactcaagtcactcttagaaaaactaggatcgttgttatttactgtaatgatgtttttcccagaatagttaagacttgccagttttgcggcactaacagattcaatattgtgtttgccagtgtacttcttgagttctttgcgcagtttagcaatctttttgtctaggctaacaattttcttttcagtttgcttgttttcctgcgcaatttgcttggtctttttctcagcactgtggtcatatttgatgatagttttaaccttggcgatgacattttgacttagactaggattagtaatcgcaccatagccgccaaacaaaaacaacgtacttgaaacaagtgtaataattttcttcttattcatcacctttttgcctttctgtaaccagcattgattgcatcctgctcactattgaagtaaaccgcatttgcggaattcatatgatagcctgcttgtcctggtacgtgataaatcttagaattgacgttaccgacaattttgccagtttctgctgtatctaggtctccatgattgccgccaccattagaatgatgtgttgcagttgaacgactagattgagctgactcgttttgccgtgattgttttgctatttgagtagcttttttagcagctgcttttgcctgttctttttgctccttctcttgttcttcttttttatccttagcatctttaagttcggagcttagcttatcgtactcatccttcttcttcttttcttcggctaattcaaaagtctgctcttctaagacttcttcatcagtagtgcttttctcttgaaacttcttctggtgctcaatatatgctggttgagaatgtactaattcacgagtgatgtttagaccatatttatttaatagcagtttttcagtatcactaattttataaatacttcttcttggtgagattagtaaaccagctaattttaaatcactaagcgcccaagctactcgactaattgctactaaatcatgatatttagaaggatatcttaaattaacaagttcttcaggtaaattaatctctgtgacaacagcttatcaagctctctacctacccattcttctttagtactcgctacctctagcatgggacctaaaaatgcatcccaagttggcatcccattttcactatgttttaaagttttgtagtcaatcattttttatctttatcaacttaggcgtattactgtaatgtgttcgcccagaagcttttatattaagattgactggttgcatcaaatttacgctagtcaatattgcctctcctgactttaaactcgacaactgagctaatttgtctttatttaggaaattattgattgctttaatttcatattcaccagttaaccgatgcattaaaagtgttcctatctgatttaatactatagttggcacatctttggggctttgagtagttaaaaatagaaatattccattttttcttccttctcgtgctaacgtagccagaggagaaataaaatcatcttgagcatctttttctaaagcatatctgtgaacttcatcaacaaataataaagttggatgttttgtcatatcatgatttaataagaaattacttatatagtctacaattacttgtcctaatccaattgaaaatttggaatcatttaaacgtatatataatgatatgtcattaccttgaaattctaacatttctttattaaggtctttgagtatctttttacctttatctgtttctccaaaatccttatcttgagttttactatctacgtttaaaaataactcttttagattatacgtcttaatcaaatattttactttacgtattagccaagaattagctccatatgtaaaataatcaaactggtaggttccttgttttatacctttattccaactaagttttaaagaatctttctcaatttgtttatctaaattgtttatatcaaatgattcattaaaaactttatcagattcccactgaatctgaagatgcttgtactgttcttgatttgccccttcacagtcaagaatatcatttcttataaatctattctctgcctcggttaaatttaccttatttaaatgctttttatagtattgaacaaattttaatttttttattgcctctaaaagctcaatcacttgggaattatcatttggcctaaataaagaaatccattgttcatcagtcaaattagcagtattcaagaataaatttttccctattgtttttaaattaacctcattttttgaaaatgcatctttatattcaccagttggatctataatcaaaaattttccttttagcttttgatatttatctaaaatcgctaatgcactagttgatttaccagaattcgttgctcctacaatcataaaatggtgattaaataatccatcaacactaattttgaatggaatagctttcttttcatttaaattaaagcttgaaaattcaatttgattatcccttttattaatttctaatgaatttatatatttcttaatagcttcatcattacagatatatgccttatcaccaattcctactgttagatctccgggcaatacaaacgtatttttatcgtacattgccattagtttaatttcaatatttgggtaaataatatcatcattattttctattactgccttatgaatattatcagtattattaatcctagaacttattactttccctaagaaaattggagactgtaaaatagtttgtgtaaggatgaatgattccttaaatttatttctttaaacattagaaaaaggagttcctttctcgtatgattggtttgaacaaaaaaacacatacagaaagaagaactccttcatgaatgattttaccaaagattttgctcaagctctattcaatccagacaaaataaatgatttattgcgcaaagagctacaacaggctgttaataacttgttagaagctgaattgactgcctttctgggctatgatccctatgccagaaatggctggaatactggcaactctagaaatggtgcttatttccgcaaagttgatacgcaatttggcccaattgaagtgcaagtgcctcgggatcgcaacggtcaatttcatcagcacacgctgcctggctacaagcagcactcggatatcttggaaagcatgattatcaagctttactccaagggcgtgaccaccagggaaatagccgatctaattgaaaagatgtatggcagccattacagtccagctcaggtatcaaatatttccaagcagatgattccaaaggttgaggcttaccacaaacgcaagctaagcgacaagtttttctgcgtctatttggatgcgacataccttcctttgcgccgagaaacatttgagcgtgaagcagtctatattgccattggcatcaagcctaatgggcacaaggaggtcattgactactgcattgcgcctagcgagaacattgaagtctggacagatatgcttcaaaacatgaaatcccgaggcttaaagcaagttgagctttttctttctgatggtgttgttggcatgaaaacagccttggccaggacttatcctaaagctcattttcaacgctgtttggttcatgtcatgcgcaatatctgcgctaaagtacgcgtcgacgatcgtgaaaagatcatgaacgaattcaaacaggtgcatcaacagacaaacaaagaagaagccacagctgtcctgcatgacttctataccaaatggggcaaggtttacagccatgttatcagaagcttgaaagacatagaaccagatctgctggtcttttataactatcccaagcagatcagagcttcaatttattcgactaacatgattgaatcatttaacaatgtgatcaagcgcaaagctaagcctaaggcagagtttccaactgaacagtcgcttgatgcttttattggcattcaggcaatgagctacaatgaccgttatttcaatcgaattcataaaggctttggtcaggttcaggacaccttagaatcctactttgattaaataaataattaaaaaatcaatttacgagaaagaactatttacacaaaagatttgacagtttcgaaaattgtgccattactatcaatcaaaacatgataattaatagtattagggcgtaaaacatcactttgattgaagcgatacttcaataaactcatgttttctatttgaatattagcaaaaatagaagatacagtagatattttacctaaatagtattcacatttgtctacatgcaaatttttgtctgaactatcaaaaaagttatctatcaaactcatagttatcccacataataagataaatcataattataactacacattgttgctttaagaaaagcaatattatatcctcgatctctcaaatcatctaaatcactccagttgtcattaacatcttcttgttctgtttttttatcaaaattatgaatattataatcagtaatcaaacaatctaaacttgagttatgcttaattgcgtttataatcattctacttatgtgattatcaccaaaactaaaacccgaagtaactaataatgtattaggttggtgcaacttattttgaaatcgagacatgagatcaaaatagggttcctcatagctctgagcatatttattagaacttggaaaaatcatttttacatgattactgttatctctaatcgtactttttacctcttccacagtcgatttagtaactttattttctttttcaatccaattaatagacccatgaattttaagaagatctataacatgctttttatagataacttgtttagtattaatattgttaacttctttactcaaaacccactcatacatatcatcattgaattctttattatttccaaattcaaatccatcaaatattgtgaagttatctttttccagagatttttcaattgctaaatcataatttgtagtcgcaaccatcaatttactgctatccgaatgaattaaattaagcaactttaaaatcactttatcatgcttaaatggcattttagatgtactatcgaaattataatcaactgaatcaagtattgatagtaaaataaatctttttaattttttggcttgtgataaacttggatttctgacttttttaccagacatctctgcgtcttgaatatataaatttaaatttgaaatatattcttctaatggaaaagaaaaccatgtactttcatcatcaaaattaactttttcaaatttttcttgttgatctttaggtaaaaagatcttagcatccttttcatctaaatattcttctaaattatttgttccataaagctgattgaaaatattccatgaaatatcttgcatagtctttccataatttgaattaatatttccattctcattagttacaactgaagctccggcaccaactaatagcacaacattactataatctttacttataaaacgcaaaacagcccttttgagaaacttatgaagttgcttttctaaaaacacaaaatcatgatcattatcatcatctggatttattttatctctataaaatttacttagtgctttctttttatcttgtttattatatttatcaggtaacgataactctatatctatttctttatctctgtacaactgcatacttaatctcctcgtattatataaattcatctcttaaaagttaattctaatatataaacaaattgtcaattttatcaacaattctattctgctccgctaatggtggaagaggtaatttcaaattaattaatttactcaaatatattcctttttgggttgtccctttcgcattagcaaaaatttgagttttaaacattgctgaaattaaaacataataaagaaacttacttaaaatattactactaataaccgcaacacttctttgagctgtaaaaagtttatcagtatcaacaactgcagcattacctaacgagcctacaatagtgagtaatacatctccctttcggatgtttgttcttttatcctcttttaaaaattgatcttcagaaacaaatctatttgataaagaaaaatctatttttccttttttaatgtttattgcagagataacttgttttccttcatgtgaattcggtgggggattatgcgtaccatcagtaatcctttttgcaatattccccaatctaacccattcccaactatcaggaatatcaaacggcttttcctcatcagtgatcggaggcaacggcttgctcttcttgatctccttttccttgatcatcttccgcttctcagccttaatcttctctagcaaaacactagctggttcatcatggggatcttgctcgactaattttccacgcattgccaaatccagcaccttcgacttcagcaaagtctgaagttttgcgtattgttgagtagaagattcgactttgcgaagcaaagcgaatagctgcgctattttagcagcgattcgactttgcgaagcaaagcgaatagctgcgctattttagcagcgattcgactttgctcttcaagtggtggaagtggaacaagagtttctttcaacttttttgaattaattgttggtacagcagatccttttacaaagtcttttatgtccaagcttaaaaacagatagaatatgaacttgtgatttaagtcattgtatggtattaatcccccagtattaagatcaaccaatgaatcttgagacaaaattcttttttttgcggttaatatagctccaccgtttttaggaaaaataattgtatttttaggcattacttgtcggctatatttttctccaacccaatttttcacgttttccatatataagttattattattcatatctttaaccttaaagtatggataaatattatcactacttatgtcttctttcttgggagtttttccattttttagtaaacctacatcccccaatctaacccattcccaactatcaggaatatcaaaaggcttctcatcatcagtaatcggagcaagcggcttacttttcttaattttcttttccttaatcaactgctctttttcagctttaatcttctcaagcaatacactagctggttcatcattaggatcttgtggcaccagctttccgtgcatggccaaatccaagattttttctcttaaagcctgtgcatcaaaatctaaagtattagtcttcatcgtcaattccttctaacgccttattaagttccgcaattgcatccctaattgccttagacttgtcattcatctcatctaagatttctttcaacgaacggttatcgtgctcttcttcatcattcatccaagaaatatcaaggctagtattaggacgcttcaaaatttcatcaatcgtaaacttgcgccatctaccgttagaattcttctctttatcccaagtttcttttctctttgagcgatcgtcaacgcagaatagtttttcaaattccgcaaaatccttgtcacttaatggattacgcttaccaaatgaccgcatctgatgacgcatatcataaatccaagtttccttggtattatccttgtcactttcaccgcgagtaaagaataatacattggtctgcacaccttgagcgtagaaaatcccagtaggcaatctcaagatagtgtgcaagttgcacttgttgagcaagtcttttctaattgcttcgccaacaccatcggcaaacaatacattatctggcacaactacggctgctctagctttaccattgtgtttaagtgaattgtagataatctgcaggaagttcaattgtttattactagtcttataagttaggtcgtcacgacttacactgtcgtcactacccttcttggtaccaaatggcggattagttaaaactacatcaaaatctttcatccatttaccatttgaagataatgaatcccctagttccaatcgtccatccatgccatgaagatactcattcatcatggctaaacggtgcgtggtttcaactaattccataccagaaaaagcttcttttacttgaaattcttctttatctgcggacaaggttgaataatcatctgtttgatcttttaaatatctgtcagctgctaccataaagccaaaagtaccagcagcagggtcattacagcgatctccaattttaggctgagtcattctaaccatcatgttaatcaacacacgtggggtaaaatactgacctgctccagatttgacttcgctggcgtttttctccattagaccttcatacaaatcaccaaggccttcgtcacgagctgaccaccaatcaagtgcgtcaatatcttttattattttttccaggtcagcaggtttgtgaattgaagtagaagcatcagcgtaaattgaattgattcttggactattaaccacttcaggattacctaaatcaagtaataattggcgataaaagttacttaactctagtccttcctttgaaacaagattatcccattgatattttttggggatatcatcctgttcaccttgttccttactcatttttaagaataagatataagttaattcagtaatgtaatcttggtaactgacaccatcatcacgcaaaatattacattcattccataacttttgaacgatttcttgattgttcacttaattttgctcctttaaaaattgtctcttttgaagatttccggtagatatatttgaatattagtaaatggatcatcattaatccagtcactctttttccgatacaacttattggcgtgatctactgcatcttgcactttatcaaaaatatattctcgataactattacctttaaagcgactataatcttgattaaaataggcagatctagacagtttctgtactagctcttttctagtataagaacgagtgacactttcaaaatgcattaaaatccaaatttcaaagtctattgaagaaaacataatagtaatatcattttttcgagcaagtttagcgcatttccttaattcatctttagaatgctcatctctatcgaaaacaacataagttttatctaaatgattatatttgccaaacttaactgctttttctactagacttttaccgagactgtaaaatagtttgtgtaaggatgaatgattccttaaatttatttctttaaacattagaaaaaggagttcctttctcgtatgattggtttgaacaaaaaaaacacatacagaaagaagaactccttcatgaatgattttaccaaagattttgctcaagctctattcaatccagacaaaataaatgatttattgcgcaaagaactacaacaggctgttaataacttgctagaagctgaattgactgcctttctgggctatgatccctatgccagaaatggctggaatactggcaactctagaaatggtgcttatttccgcaaagttgatacgcaatttggcccaattgaagtgcaagtgcctcgggatcgcaacggtcaatttcatcagcacacgctgcctgactacaagcagcactcggatatcttggaaagcatgattatcaagctttactccaagggcgtgaccaccagggaaatagccgatctaattgaaaagatgtatggcagccattacagtccagctcaggtatcaaatatttccaagcagatgattccaaaggttgaggcttaccacaagcgcaagctaagcgacaagtttttctgtgtctatttggatgcgacataccttcctttgcgccgagaaacgtttgagcgtgaagcagtctatattgccattggcattaaacctaatggacataaggaagtcattgactactgcattgctcctagtgagaacattgaagtctggacagagatgcttcaaaacatgaagtccagaggcttgaagcaagttgaactctttctttctgatggtgttgttggcatgaaaacagccttggccaggacttatcctaaagctcattttcaacgctgcctggttcatgtcatgcgcaatatctgtgctaaagtccgggtggatgaccgcgaaaagatcatgaacgaattcaagcagatacatcaacagacaagcaaaaaagaagctgcagctgtcttgcacaaattctatgccagatggaataaagcttatagcaatgtcatcaaaggtttgaaggaaattgagcccgatctgctggtcttctacaattatcccaaacaaatcagagcttcaatttattcaaccaatatgattgaatcctttaacaacgtcatcaagcgtaaagctaagcctaaggcagaatttccaactgaacagtcgcttgatgcatttattggcatccaggcaatgagctacaatgaccgctatttcaaccgaattcataaaggctttggtcaggttcaggataccttagaatcttattttgaataaataattaaaaaatcaatttacgagaaagaactatttacacaaaagatttgacagtttccttttaccagacaaatctgcagcaactattttaactttaatatttgctaaacgatatttctgcttaagcatagtaaaatattgtttttcagattcaccttcacacagaattccaataattggattagacttagtcttatttcttattcttcccatgctcatccccatatttttcatgaatcatttgcaatacatctagcaaaccatctacatctattacaggaactgcaccgaatcggccttgtaagtatctcttagcaaacgaaatatcatgtcgacctttattacgtgcatcttcaaagtcaaagattgatttcaaatcactaattccgtgaaaatccttgtctaataaataaatttgatcaattcttaaatcgctgtctaatagctgaatatcatgagtagtgataataaactgattcaaattttctgttgaattaaaaatacgaactaaagcagctgcaagttcaacatgcagtgaatcatcaaattcatcgattacaatcgtcttctcgttaccattcatttgagcaagcatcattgctaatactatataaaataaacgacgtgtaccaacagactcttgtgttaatggaagttccccagaattaataacttcattttgatgataaatcttgtgaaccgtatatagttctttagttgttttaggataatcaatatttaaattctctacaatcttttgtaattgtggattcaacggattagtaggtacttctctaattctaatatcagagatattaaaatccgcaaaacttaagaatgagatcatttcttttttgaggtattcatcttccatcaaatttaaaagttcgtcaggaatatttactggatagccgctgccaataaaaatcagatcattaacaaaccacttatagatagcaatacaatctgcatcattttcagattgtgctaaatataggaataaagaattatctctaagcttaggaatgctgtcttccaaaagcttgttagagacttgaatgtcatttccatttcgagaaaaaatttctttttccttgttaccactaattaaggttaatgcttcactggtaatgctctctcgattgtaactaaatgaatagtcataaattttgttttttaactcaagcttcacttcaaagtaagtatcttcaatcttggacttttcatcaaacaaaaaaggataataatttaacttatcagttacggcttgagttggacgtgttactattccttccattgtttgtaaagcttgaatcaattgagacttacctgaaccgtttggaccaaataacagtaagctttttaataatgatggatttttacttgagaaagtattagtttctttcaatttacgtagtctattgcctgtctctgcagacaaggtagtgcgctctctaaaagaagcataatttttaacagtgaactcgattaacatattgtattcctccgtgttaatttaagtttagcacacgcctttttttatcacaacttttcgtgattaaaagcaaaaaataccagtaatggcatttttaaacatataaattctcattcaacacgtaaataatctgatcagcattttctggaaagatcttcttaatttgcttataacccccgtgacgtttaaagaaatagttatcatcaaaggctttctcagcatttggccccaatacagtagatgaaattaattggttctcaattctcttcaaccatttcttttgaggaatagtccaatcagctaaaccataaactttttgcatggcattatgaattctaacatcatgatccaccaactcagatccagccgcagcttgtctaatgaagctaataatatcggcagtggtctgaacatggttaacgtttttccatgcactttgcaaatcattttctttaaagccattttgctctagcttaagtttaatatttttgagttcatcaaaagttaaatccttcggtctagtagctacaacttgtaaggctggaatagtattgacgttttcattaacgaatttattgaagttttcaatataatccgctggtttttgattgccatgcccataacctcgacttacattaattactttgtctactgcgtctgatattatttgcttgggtttgacaggtttgatgtgatctaactgctcaaacttaggccattgctttaaaaattgggacttatctaacttacttaattcacgggcccattgatcaaccgaattaatctcagctagatgttggaactcatcacgtttagtatcatccaaacgtttaatttttctctcaacggcaccagccatatctacttgatactgagcggaatcctcatttgtctcaaagaaatcatccttgtgatttaagaagtagtgaacattatgtcctggatttttaacaacaggcttcatgtttgtcactttattcattgcttcatagattccgacggcatcataaatcgtaaatttggatttattaatttcgggacaaagtctggttgcccgtcccaacatttgctcatagaggattcttgactgaactcttcttaagaagacaatactagtaatttgcggtacatcaattcccgtagttagtaaatctacagttactgcaatattggggttggtttcattcttaaagtttttaatttcttgattaggatgccgaattgaaccagtaattttttcgatagcatcgtcatctacaggattactcacttttttgaatgcttttttcaataagtcaacaaccatatcagcgtgttcatcagttgccgcaaagattaaagttttacctaaatttggatcatttggatcaagatatctttgagctaattcatcacaaactacttcattaaagctacgtgtgataactctcttattaaagtcttttacatcaaaattcatattatcaggtaatttttctttattgatagttttttcatcctgatcaaaaagactaacttcggcaccctttttaaaatgaatcccttcttgagacaattgagtttgaataattactggtgcatcatgatccactaaccagccatcgaggacagcttgttggtagctatacgaatacaccggtttgccaaaaatatcaatcgtttgtaaagctggcgtagcagtcattccaatagcagtcgcatcaaaataatcaactacacgtctatattgactaacataatcttcttgactatagaattgatattctttatcgctgagctctttatcttctgcataaccacggtgggcttcatcaacaataatgaaatcatattgaccaacggatggcttatcatcactgtcttcactgaaaaataggcgtttgatcatcccctgaaccgttgcaatttgaatttttgttgatatttcaggtgccttatcactcaattcctttaatccataaatggaagaaattgacatcgtacctattttattatctttaattgcattggcagtctgctttcccaatgaattacggtcaactaggtaaagaatacgtctagctctcttatgcttaagtagtctgtacatcaaagcaattgccgttctagttttaccagtacctgttgccatggcaagcagaatacgcttttttccatctttgatggcattttccatcgcttgaattgcagcaatttgatattcacgatgtgcaaaatcaggaaaatcttgatcatctaccaagtcttgatttgcttcttctttatttttagcagaaagcttcaacgataaatcttctggcttatgaaattcctctagagcatatgcgctttctttatgattacgtgcatcccagaaccaaataccagatttttcctgatattgtttaagatatggacgaccatttgcagtatagatgaatggaactttgtaatcacccatttcatttgaaactagacgataatctgatctaaacggtacctctttagaatattccttaggctgtgccatttgccctacaatatcttggtcccactttttggcctcaacaattccgtagaactccaaacctttgaataatgcataatctgctcgctgaccattaggtagaacccattcagcaattgccatattgtgacctttttgcggttcagttttctgcgtccaattgttcaatttttgtgaatctacttcccagcccgcatctcgcaattgttgatcaattaactgacgtgtttctgcttcagttaactcatgttttttagcaaattgaacgttaatctggcgtctgcgttcacgctcttcaggagaaattatgacttcctgcaccctattttgttgtaattgctttatcttttcttcgagagctttgattttatcttcttgagttttaattaaagctttttgatcttgtggctcaacataatctgcaactttatccagagaataaacttctaaaaaccatttccataccaaataagcactctgatcaatttcaagcgcaatctttttggtagcaataaaatgatcgtcatgcgttgccttgttccgtcttaacctgatcaaattaagagcattcaaaacagtaggtggatattcattcttagaatatgccattttttcaattcgttgtttttggtttaattcccaatcacctaaatcatccaaatgcatgatttctttagttaattgctcaccgaaagtaccaaaaactgtcaaactacttctaggatcagagtaaattaagctttcagcgctggaagccaattttgcgtattcttgataatctttttgtgaagtttcaaagttagacattgtttttcctctaatattaaagtaaatatagttttattctacctcgaagccccatttaataacaagtagtgtaggtacaaaaaaagaagcaccaacacagtgcttcttttaacataaactaaataatcaatcgaaccctacttcgccaaaacatattcaaatcccaacatattggtatagcgattactacctatcttaatgtaatcatagcctttgatcctcttggtgccataagtttggacataattctttgtcctggtattctttgacttgatttcggcaacttttttaccctgggcatttaccacaggtgttacagtttgcacagtgtagtaatgtttgaccacttttagcttagatgcttcgaaattaccatacttaacatatttatttacatcaattttgacatttttttgccctttaatagtcataattgcttgaattttgtaaggggtccccttcttcagtaactttttcgtctttatacctttagcagtataaacgtatgcattactttgcaatttctttttcttgccaacagtaatgccatcagtgattaatgggctaatatcgactttgcgctttctaatggtatctgaagaatagccaaaccaaaatggactcttcttggtaacatcccatactggacgagttgttggatattgccaattacgtttgctgttataaagttgaacgtcaagctcacctgtaacttgaggctggtaatagttgtagatcaggttcatcactttttgaacctcataagtagttaactgatcagttcgtctaacgagcaactttttaccatcaagtgctttagtcgtattagttaaaaacttgtcagcttgactaaccgcaacttcactggcatttgtctcaccaacaacagttttagcattttgcaaataagtcaagaactgtatctttttatcatagtcagctaatttatagcgatcagtcttttgaaccttttctgcagtggcaattgcagtagacaatgatgacttattagttgccaccttgctttgtgattctgcttcaccggctgtgttgattggcgtaagttttactccctcaacctttttgacattactagccaagatatagccttcattatctaacttattagttttagcattagcttcacctgttgtatggtagaaaagttcagctttcttttcacttggtacccaaagatagagtgcttcattaattttgtggttgctatacattgcagtttcttcaaccgtattggtatagaactgtttagatagctcttgacttgtcttttcaccgtcaacattgtacaaaagaatctttttatccaagacaactttggtagaatcggccaattcaagatctgaatgattctctaaagcttgtggcaaattcagatcatcttctgatacccaataattagtgcccttgatccggtagtatgaatagtgatcatgatcaaagtcggtcaattgttgtgggaattgcccagcataatcgactgtgatcttttgtcccttctttaattcaatattattaggatctgtaccccaacctgttgaattaacatatcttgtgatggttgaagtgttcttattaacggtcacagtaattggggcttgagtgattagacgatagccatcaacgtaaccgatatttgcgaccttgatgtaacgaccagagcctaaatagtagtaatctttgcccttaatcttagtgtaagggatgcgatacttatttttggtagcttcataatagtattttgctttgccactagtgattttccgtttgccaacgtacttgactacgctaccttttttaacaaagccaacttttttgccagacttattgtaaatattggcattaaaaattgccgttaaataagcagggccagatattggcgttacataatctgaagaaatataaacattcttgcgtaaaggatagtataactcaccagcactgtagtcgcctggatcaaccgtcttaaaaaatggttttccataatatttaatcgtgctacctttcttaggtgcagaaatatgatccaaataattgcccgagctattgtacaacataatatgtgaatcaatgacttttaaggagccagttgcattgcttttagtagctgcggcaactgatgtttgaacgtttgaagttagtggtgctgcggcaattggagacacagccaataacgcagtagaaattaagataagttttttattgattttcataatgaaccttcgatctaataaatgcaattaagatttgatcagttagtactcatatcatcattatagcagttatagttatttattccttgatattgagcctatcaagaaagagatcgaaacccagtgtctcaatctctttcgattttattttgttttcttcttacgagtccataatccacttaaactcaagccagacagtaataaccctaaccatgaaagatcactatcttgcctacaggttgctggtaaaacagacttagaggatgatctcggtgtaatttgttctactgtatcgtttttcataatagaagtttccgtttgagcagctgtagttttaacagagtttaatcctactggtgatgcttcactatgcagaccaactcgatgagtggtaggctttctttttttatctttggcatgacgctcaagctctgtggcctttgctagtgccggtaagaatacttcttcatcagttgaagtctcctgacctttttgttcacttggatcatcagaactactaattgaagattcagaagattggttagtttcatcagatgctacttaatcctaaaacagagaagccaattattgcggacacaacacccactgataattttctgaccgaataatgattttgagtttcaattgattttaagtttttcttttgataatttcttctttctagcatatctatattataatttattttgacaatttaacactatattttatatacgcgatcactttcaaataaaataaatttagcacaatgagtgctctttttaaatagtttaatcatatttcttaatagatatgtaattaaagaaacattacatatagattaatactatgagactgtaaaatagtttgtgtaaggatgaatgattccttaaatttatttctttaaacattagaaaaaggagttcctttctcgtatgattggtttgaacaaaaaaacacatacagaaagaagaactccttcatgaatgattttaccaaagattttgctcaagctctattcaatccagacaaaataaatgatttattgcgcaaagagctacaacaggctgttaataacttgttagaagctgaattgactgcctttctgggctatgatccctatgccagaaatggctggaatactggcaactctagaaatggtgcttatttccgcaaagttgatacgcaatttggcccaattgaagtgcaagtgcctcgggatcgcaacggtcaatttcatcagcacacgctgcctggctacaagcagcactcggatatcttggaaagcatgattatcaagctttactccaagggcgtgaccaccagggaaatagccgatctaattgaaaagatgtatggcagccattacagtccagctcaggtatcaaatatttccaagcagatgattccaaaggttgaggcttaccacaaacgcaagctaagcgacaagtttttctgcgtctatttggatgcgacataccttcctttgcgccgagaaacatttgagcgtgaagcagtctatattgccattggcatcaagcctaatgggcacaaggaggtcattgactactgcattgcacctagcgagaacattgaagtctggacagatatgcttcaaaacatgaaatcccgaggcttaaagcaagttgagctttttctttctgatggtgttgttggcatgaaaacagccttggccaggacttatcctaaagctcattttcaacgctgtttggttcatgtcatgcgcaatatctgcgctaaagtacgcgtcgacgatcgtgaaaagatcatgaacgaattcaaacaggtgcatcaacagacaaacaaagaagaagccacagctgtcctgcatgacttctataccaaatggggcaaggtttacagccatgttatcagaagcttgaaagacatagaaccagatctgctggtcttttataactatcccaagcagatcagagcttcaatttattcgactaacatgattgaatcatttaacaatgtgatcaagcgcaaagctaagcctaaggcagagtttccaactgaacagtcgcttgatgcttttattggcattcaggcaatgagctacaatgaccgttatttcaatcgaattcataaaggctttggtcaggttcaggacaccttagaatcctactttgattaaataaataattaaaaaatcaatttacgagaaagatctatttacacaaaagatttgacagtttcaatactatttttcatgccttcttttcttatcgaaatacttgattataagagcaatatagcttttatcaatcgaattataaaataacagttatttaagtataaaaaataaaaaaagcagatcacccagactaaggtaatctgcttccgttttacagcaactaatctcactaccacttaagcttcagtttatggctactttgctctacctgtaaaaatgaatcaacgtagcgcttaaaaccaggtaaatattttgcaatcaaatgatattctcgtgaattaacaatttctttcttttgggctgcagaataattactttcacctacaaaaaagttccaattcaattgatctacaaattttatgaccacgttagcatcatttttatctggtaaagcttgcgcaatctgatttagttgcttttcatccaaactaaaaaacaaatgcttcaaatattgcgaaaaatctgttggcactttttgcttttcttctgcagttaaccacgattccattttgaaggaatgcacctgatattgcatccccgcttcgtctaaatatagctgaccatattcctgcttagtcatacaaaaacaagctcctgctacctccgcaattggtcgattagcaaacggaccaataatattctgtgcgtgcatatggccagaaaagactgcttttacattatatttttgtaataaaccttgcagtgcaagtgcattatcaagaatatatccctgatagattactttattatggcgatacagattatgatgcataaagaatagcacttgttgctgcttttgctgcgcatcaattaattctttttcaatccagttcatttgagattctgaaattcgaccgttagtaatcggatgagtttgtgattcctgcttgccataaatatttgagtcagccaatattagtcgatactgcttattcagattaacgctataagccagtgaatcagaatcttcatgtaaagcataatgataagaatcagcaaagatctctttccaaatagctgggctaatttgcagggtgtaatcttcatgatcacctttaaacttgcgagcccagccgtcaaaaatatcatgatttcctggtaaaactaagaatgcaattttatttttagttaatggcttaaaaatattagctaaacgttctcctgatattttagcgccattaaaggttacatcaccagtaattatcactgcagtgggcttctcttggattactttacgtacaaacgcggtcaaagcaatttcctgataatctaagtctttacctgcactagtgttgcgcatatgctgaaaagcaagaccatcatcatgtaaactatctgcaattagatgtgtatctgataataaccaaagaattggcttctttttactagtaatcacaatttacctttttcaaaaatctattttcactttaactactcatcattataccaacaaaaaaggcatccctgctagggatgcctcattgcgataaaatattgaattaagcgtcgatttcttcgatcttaatgttaactacgaatgcttcaggagtatcagtgcctgaaacgatcttcttagcgtaatcgtcgccttcatgaatttcagcatgtcctaaaacacgaaatgccttatgagtaggaacatcagcgacaacaatagctgctactgaaccattcttcaagttttcataagcagttgacttagtcttttcaagatattgaatagttgaagcatcaattgccttaagtgaagccttaggaccaacttgtggcacaccgttagcattcacagttgccatgtatggtaagtgtgagttaaaaaattcaatttgttcatcagtaagcttagtagtatctaattttttcataaaattcgacctttcttttcttaacttcattattaattataagctatttgctagaaaatagctattattttgccttagcttaattgattcttacatttatcatacacaagatattgtatttaataaaatgtgttttttaattaaatttctcttgctactaatatttttattaagtaaatagtcgttgatatatcaatgcttataaatgctggcaaaaagtcaaggattgaattttctttttttagccaatagtatattatcttgcattagttaataagtgatacaagatattgtgcttattaaaataaaaatatattttaaatttcatttttattaatgttatttttagtgaggagaattcgagaaactgtcaaatcttttgtgtaaatagttctttctcgtaaattgattttttaatcatttatttaatcaaaataggattctaaggtatcctgaacctgaccaaagcctttatgaattcggtcgaaatagcggtcattgtagctcattgcctggatgccaataaatacatcaagcgactgttcagttggaaattctgccttaggcttagctttacgcttgatgacgttgttaaaggattcaatcatgttggttgaataaattgaagctctgatttgtttgggataattgtagaagaccagcagatcgggctcaatttccctcaaacctttgataacatggctataagctttattccattttgcataaaattcatgcaagacagctgcagcttctttttggcttgtctgttgatgtatctgcttgaattcgttcatgatcttttcgcggtcatccacccggactttagcacagatattgcgcatgacatgaaccaggcagcgttgaaaatgagctttaggataagtcctggccaaggctgttttcatgccaacaacaccatcagaaagaaagagttcaacttgcttcaagcctctggacttcatgttttgaagcatctctgtccagacttcaatgttctcactaggagcaatgcagtaatcaatgacttccttatgtccattaggtttaatgccaatggcaatatatactgcttcacgctcaaacgtttctcggcgcaaaggaaggtatgtcgcatccaaatagacgcagaaaaacttgtcgcttagcttgcgcttgtgataagcctcaaccttggggagcatctgcttggaaatatttgatacttgagctggactataatgactgccatacattttctcaatcaagtcagcgatttctctggtagttacgcctttggagtagagcttgataatcgtgctttccaaaacatcagagtgctgcttgtagtcaggcagcgtgtgctgatgaaactgaccgttgcgatcccggggcacttgcacttcaattggtccaaactgggtatcaaccttgcggaaataagcaccatttctagaattgccagtattccagccatttctggcatagggatcatagcccagaaaggcagtcaattcagcttctagcaagttattaacagcctgttgtagctctttgcgcaataaatcgtttattttgtcttgattgaatagagcttgtgctatatttttggtaaaatcattcatgaaggagttcttctttctgtatgtgtttttttgttcaaaccaatcatacgagaaaggaactcctttttctaatgttttaagaaataaatttaaggaattattcatccttacacaaactattttacagtctcgaattcgatgacaaagaaaggcttaacaaaatatttatcaattggtgcagtaactactgcagcattatttttagcagcttgttcaaatcaaaagagcactacatctgctaaaaatagtaagacagaaattactatgtggcacgcaatgaatggtgcacaacaaaaaactttgaaacaattgactaataaatttgaaaaagaaaatcctaacatcaaagttaagctagaaaatcaaggtaattaccctcagttacaagggaaaattacttctactcaacaaaatcctaataacttaccaacaatgactcaagcttatcctggttggctttatcaagctgcgcaaaataagatgttggtcaatttgactccatacattaataattcaacttatggttggggctcagtagccaaatctaatattcgtcctgaattaatgaagggtgcgcaaattaatggcgttcaatatggtattcccttcaacaaatctattgaagtcttgacttataacaagaccttacttaagaaatatggtttaaaggtacctaaaacaatggcagaacttaagtctgtttctaaagcaatttatgaaaagtccaaccataaaattgttggtgctggttttgataacttagccaactactatgttctaggtctcaagaatgaaggacaaacttttggtcgttcaatcaagttagattcggctgcctctaagaaagttattaacttctacgcagatggcgtacgcaatggctactttagaactgctggtagtgaacgttacctctccggtccttttgctaatgaaaaagtcgcaatgtacatcggtacttcagctggtgaaagctacactaagatgggtgtaggcaacaagtttacgtacggcgttgctcctcgtcccggtgaatacactatttctcaagggactgatctttatgtctttaaccatgcttcaaaagcacaaaaaaatgctgccatgaaatatatgaagtttttgactagcaaatctagccaattaacttgggctaatgagactggctatattcctgttaacgataatgtcttaaatagtaaggaatacttagacagcaagatgaaattgcaaagtgtcttaaaggattcaatgaagcatctctacagtgttcctgtagctaagaattctgactctgcttataatggtatgaatcaaattatggaaaatattttaattgctgcaaataagcatcaaaatgttaatgctcaaattaaggctggtcaacaaaaattagatagcgcttggcgtcaataatgatattaaaaaagcatccccttctctattttgattagggatgcttttttgcatttgcaagagttgaatttaatttaagcactcacatagagtgcgacgtgcaaagcacctacttttgactggggcaaatgtatttcatccaatcctaaatatttggcttcatcaactattatactatgtcaaaagtatataaagaagagttaacacataaaatacaaaacaaaatcagtgcgaaactccctcatttttatgttcacatagggttcgcactgatttttttcttaactcaaatctttcttagtaactgccaaatgtgccttatcattgataaagacccagattggcaaatctattcctgttgaatcagtcaaattatttacaatttcactgataaaaagctggaccattttcttaggcggttcagtaaagtctcttctttgcggcgtgtaccataaacctgtgattggctttttagtttgtcgatcgaaaatacaattcagggtttcatcatattgatcaaatgaggccttgtagactatatgtaatggatgatgtgccaagttctcgactaactgataacgcatatcgtccgcaatttttcctttactaatcatcattaaactggtaactggaccattttctttttcaaatttttgcaacttgccttgtttgattagcttcttttcaactgaaataaaactatcagaatcaactaacatcgtttttccttctcgtattatataaattaaatcagtgataatgattattcttttagtttgtttattcgatcatcagatgctagtctctaattgtcattgaccttggtcaattggtataggttgtttccttctgtagctttgactacttttttagtctgccgcccaagcagttttactaatgacttactcacatgctgtatcgattctggctattactgattcagagcagattcagtcgcagctttttagcttgaacctatgaatacttatattttgcgagattgtcttagaatctgtaattagggactaacatgtgatgatcgatctatgaccaaatatttgctagaaaggaggccattctcaatgaaactttttatcggaattgacgttagttcaaaagatcttcaagtcgctattactgactcagaaaattatcaaaaacctttacttaaccaatctttttctaatgacctgattggtgctaatgaggtcaaaaagataattcttcaacttgctaaacagaacagctatgacaaagtaattatcggcatggaagccacttcaatctatagctttcaccctgcttatttctttgccaatgacgaagatttacaaaaaattaatcttgaaactgatgtcattaatcctaaaaacactaaacgatttcatgacgtttacgaagaaaataagaatgatcctactgatgcctattacatcgctgaatacttacgctttggtaaataccatgtcactattgctcggcaagaggaatacttagctttacagcgtttaactagagctagatatgaaatcacatcttcgctcactagagctaagcagcacttcattgaaactctttattatcgtgtaaacaaactagttaccgttgacaaagacaatattaaaacttctatctttggcgcaacgatgctgtcaattgttactgatagtaaaaccatcgatgaaatcgctgaaatgccaatcgaggatctaattgactaccttcaaaccaaaggacgtggccgcttctctgatccagagactttagctaaagcgatcagaaaagccgttagaggatcatatcgcttaggtaaagtcatgaaagactcgattgatgccgtattatctgtttactatgccgaaattaaaactaatcagaaattgattaagaacttagataaagcaattacagatatcgtccaaacgcttcctgaagagagaatactacaatctattccaggaattgggtcagtttattccgctggtattatcgctgaaatcggcagtattgatcgctttgacactgaagcacagctagctaaatacgctggtctagcttggcgtcaaaagcaatctagtaattttgatagcgaacacaaaccgatgactaaaaacggaaatcattatctaagatattatttggttgaagctgccaacctgattagacaaagagatcccgtttttcggaagtactatcaaaagaaatacgatgaagctttctattctccgcataaacgcgcttgcgttctttgtgcaagaaaattaaccaggaccattttcactctgctcaaaaatggtcaaatctatcaaacaccgaggtgattaattggtctaaaacatttttggaggagtaaataatagttgttaaaaaatcccttgaaatagggcttagtttcatgcacgcaaattttggttttaaaacaaactaattaaaaataaaatttaacttttacattgacttattaccacatgactctctactatctattataagcaagctgtcaattactttacataattttaattattatgcaaaaaaagaagccatgacctgaaaatcatgacttctcgcgaattcctcgtccgtaaatcgaaatcttcacgaacatttttaccttaacacaattaattatactagtctaattaattttaattactaaagcttcatatggcttcaatgagatattctctcctagtttgccatcttgtgcagaataattgctcaatacgagttgataattcttattttgatattgttcaggcaatggtgctacatgatcagtaccatagaaattagtgaaaactaatatttttttagcttcatctttcaaaaaacgttcataggcaaaaatttgtggatcatcttttaaaaacattctaatatggccatcagaaatcagttgttcgtgcttacgcaacttgatcaatttttgatagtaagcaaaaatttcaccctcgtgtaattctttttcaacattaattctatcttgatctgttggtaaaagccatggctttgattcactaaagccagcaaatttactatcatcccagtgcatcggcacacgagagttatctcgtgctttagtttttactattgcaaatgcttcatcatcgcttattcccttttgtttcaatgccgcaaaagcatttttagcttcaacatctacataatcatgaattgaagaataatgtggatccatcattcctatttcttcgcccatataaatgtaaggagttccgcgcatacaatgtatcgcagtagcaagcatttcggaagatttctctcgatatttaccagtatcaccaaaacggttaagggcccacggctggtcatgattgttccagaacaaagcattccaaccgccaccttgatccattttttcttgccattcagtaaataagtgctttaatttcatgaaatcaaacggctctttagaccacttttcaccatttttataatcgacttttaaatgatggaaagtaaagaccatggacaattcatgctcactcggcttagagtactcaatcgaattagcaatagtagttgaagacatttcacccaccgtaattgagtcaggatcttgaccaaaagtagagcgattcatttctttcaaatattgatgcactactgctgtatcagtataaagactcttttcctgacttggatcaccagttgaatcaactaacttttcatccttaccggtcacgttaattacgtcaaaacggaaaccatgtactccctttgaacgccagaagttaattactttgaacaattcttgacgaacttctgggttatgccaatcgagatctgcttgagttggatcatataaatgtaggtaataataatccgtatcaccaaattttgcccaagctggtccaccaaacttactttgccaattattaggcaaggagccgtcaggcttagcttttcttaagtaaaagaatttgcggtacttttcgtctcctgccaaagcttttttaaaccatatattttcggttgaacaatggtttagcaccatatccaacatgacgccaacgcctatttcttttagctttttagttaattcctcaaagtcagacattgtgccaaagcgaggatcaattcggtaataatccgcaatgtcataaccgccatcattctgaggggatacaaaaaagggattaaaccagatcatatcaacgttaagcttcttgatgtaatcgattttagcgatgatccctggaatatcacctactccatcgccattagaatcataaaaagatttgggataaatttggtaaattacttttttgcctaaatctgtcatttttatctcctataacttaattttctgtctacgagcaaagtcaataaatttaaactttttaggattatgaaaggataaagttaactgaaacagcgttgtatctgctaaaaaattatgactagctactagtactgcttccttactatccaattgcaatttctcttgtaaatcagcatcgatttcttctaccgtaattgccttagttgcataggatatatctagccctaatttattttctaaataattgtagattgatttttctgcttcttctggcggcagctcagtaattggtggattaaataagaaatcacagtccagcacttctggttcatcgttaatcattcttaaacgttcaacatagatcccagcatgcttcttttgttcagggaagaatttcttgaaaattgccggcaaatcatcaaccatttcatcattaagtagcttagtttttgcattcattcctaatgatttatttaattccgcaaagctagaaattcctgaaataggaaacgaaaacttttccaaattaaggacaatcgaacctttgcccttgattttttggattaatcctaacgaggtcaattgctgcaaagctttacggactgtttcgcgtgacgcgccataaagctctgtcaattgattttcactaggcaagcgctcgccttccttaaattgttgatgtttaatcttagaagctaagtcttgagcgatcagttcagattttgctttagtcatcttgaccttgtcctttcttaaaatcatgttcattatatttttgatgtacgtacatgtcaatagatatatctaaaaactatattgcaggcatgtaatcattttcataaaaatctattgacaacttgtacgtacaggaatattataataaatgaattttgtgaaaacgcttttataggaaaggaagaataacacttatgaataaaaacgaaattgcattacttgctcctgctaatggtcaagtaattgcactaagtaaaacaagtgatcctatctttagcaaaggaactatgggtgatggttttggtttaacaccaactgataatacagttcttgcaccagttagcggcactatctcaatgattgctgaaacaaagcatgcgatcggaattactactaaagatggtctagaagtattggtccacatgggagttgatacggttggacttaaaggtgaaccgtttgatgtagtaattaaaaatggtcaggaagttaaagctggtgaccaaattgccacgatgaatatagagatgattaaagcaaaagatcttgatactacgattatgactttaatcaccaattcatctatgaaacttgatggcttagatgtaactgaaggtaaagcagaagctggcgatacagttgctcgagcttatttaaaggagtcaaaagaagatagttcagacaagaaactttcgtatgatgaattagctactttcattattaagaatgttggtggtaaagataatataaataacctgattcactgtatcacacgtttgcgcttttatttgaaagatgagtctaaagccaatgatgatattttaaaaaatcaacgtggcatacttgacgttatgcatgctggtggtcaatatcaagtcgtaatcggtaatgaggttaccaatgtttacgatgcagttatgaaacaattgcctggtcttagtgacaatccttcaccttaaactaataatcaggatgatggtaaaaatcctgtttctagagcctttagtaatctaattggttttattaccggctcaatgagtcctgtaatcggtgttattgcagcatcgggtatcatcaaaggcttacttgcactactcacccttccacaacttggtgctttacttagcgtcaagagtccggtctatgtcacagttagtgctatggccgactctgctttcttctttctaccagttctagtaggatttgcagccgctaagcggttaggatccgatccaatgattgctgcagtaattggcggtttcttagtttatccacaaatgattacttggggcaagagtatgacgacaatgtttagtcttggatcttggaacttccaattcttaaactattcctactctatctttccaatgattttagctgcttggctagctaaagaatgtgaacagtggttaaagaaagttttgcctagttacttgcaaatgatctttaccccattaattactatccttgtagtttcaactatcacattagttattaccggtccaatcattcaaggagccgcaaatggtatcgcagtctttattaactggctagtatctgcatctggctgggttggcggcttaataatcggtgccttttatcagttattggttatttttggtcttcactggggcgttgtgccactagttgctcaacaaattgcctcaactggtcaaagctcattaaacgcaattatctgcgcaacaatggtttcccaaggtgcagctgttcttgcagtcgcaatcaaatcaaagaaagcagacatgaaagagctaggaattgcagcagctatttcagccttctgcggtgttactgaacccgctatttatgggattaacttaagatataagaaggtctttgcttcaggttgtattggctcagccttcggtggcctagttactggtttaatgcatggtactatgtatggctttaccggtggtctaattggcttctcaagctttttcaacccggcccatcctactcaactaaatagtttctatactttcctaattgccagtgctgtttcaattatagtttcatttattgcagtttgggtatggggatataatgacaacatgactatgggtaaaaaagtagccaagaagcaacgcccaggttcagctaaataaaaatttagagcaaaataaaacgatgaatcacccacaaaggtaaattcatcgttttttgtcttatttaagcagcatcagcaatccgttgtgcctcaattaattcagcttttctgatatcacgaggcaagaactgacgaatatcttcttcattatagcccacttgcatccgatggtcgtctgcaataataggtctctttaataatcctggattctgagtaattaaatcaaccattttagacaatgacaagtcttcattcaacttattctttaattgtttgaaagactgtgaacgagtagataaaatatcctcagttccattttcagttaaagacaacagatgaaggacatcttctttagataattccttaaagacgttcttttcattgaaagaaagatgatatttgttaagccatgctctcgccttacgtgaagatgcactacttgttgacatataaagagtaatcatacaatacgcctctttctaaaaaactcgttaacttctcgtacattagttctattgtataacttacttttttgatagtgcaagctatttttacaaaaaaattgttgaaaatagtatacttaccttactgaaagaaggaatttgatgaattttaaaacaccaattgccgaacaaatgaggccgcaaacactggcggatatggtaggccaaagtgagttgctgggaccaggaaaggctttaagaaatattatcaagcagcatgttaatatttctttacttctctgggggcctcctggtaccggaaagacaagcttagctcaaattattgctaaagagaatgattatccctttgcttcctttaatgcttcaattgataataaagcacagttgaacaacattattaatgcttataagtatcagaccttcgttcttttaattgatgaaatccaccgtatgaccaaaaatctacaagattttttattaccttatttagaaaatggtcacgttctacttgttggctctaccactgaaaatccaattatgtcgattgtgccagctgtgcggtcacgttgtcaaatctttgagttcaatcctctaacagaagacgatattgcagctgttttgaacaaggcatgtactaaggtccttaaattagtagatcaccaagttgaaaaaaattcgttaaatttgatagcagccgcagctgatggcgacctacgaattgctttaaacattttagagactgttcatgcacttaatcctaaaaagatcaccttagcaaatgttaaatcgtttactaagcagcaattctttagctatgataagaaagccactaaacattacgattatttagctgcatattctgactctatggctggctctgacacagatgctgcactttattatcttgctattttgctaaaaaatggagatttagcttcggttgtacggcgtctgcgtgagattccatatacttatattggcttagctaatccgcaacaagtaactcaaattgttactgcagctaatcaagctgaaaagataggaatgcctaaagctaaatatccactaatgtttgcaacaatgttaatgtgtatttcgccaaaatcaggagcatttgaggaaatttgggaaagacttgatcaagatagtgatcatcccaatcggtatcccatgcctaatagtttgcgtgactttcattataaacacgctaaagaaatcacgggagctggcctagctgagtcaccttttcaagctccgcatcaaatcgccaagcaaaattatatgcccaagggactcaaaggcaaacaatattattttccaaaagacaatcaaaatgaacgcagattatatgagcaatacctaaaattacatcgttatatttacggcgaagattatcaaaaataaaggacagcaatgcaattgagcatccctgtcctttttggttagattataaatgaagaaaattggtttattaattgcttctacgagagaagattctcgtccagccacctatatggtagttctatttaagttatttgttaaatgctaatcgaaaaaactttacgtactttttacgtattttattaccaataataacaaaaaagcagcggcgcaaatacagcgtcactgcaatatgtagcaagattatcaatgaagaaaatggtatttatcacttctaaggaggaaggatatttcatctagccacttatatcctaatgctacagtattaatttgttaaataaaacggctattaaatctaccaatatttttctagtggcttttcattcctaccagtgcgagtttgacgcaaatgttcagtcacaatattagtcaacacttcggctaatttatcaatctgctcaacagtcacatattcatatcggccatgataattgccaccaccattaaataagttaggtgtaggaattcctttaggcgaaataaagtttccatcagttccacctctaaaggattgtacatttggctttagtccagacttgcgataagcatcaagagccagatttacaatatatggcttgtccttaatatagttgtagatattttcatattgctcacgaatatttacagtaaatctattgccatactttttgttcatctttttaactatatcgcgaataaactgttctttacggttatattcactttgatcaaaatcacgaataatcatgctaatatcggcatgatcaacattgctttgagcatgtagaaccaagaaataaccatcatgattacgtgacttttcaggcacttgatcctgaggtaaattagacaaaaaatcattcatcaaagttgttgcgttaaccatcagaccatatgcttcaccggggtgaactacagtccctttaatatggatcgtaacctctgacgcattaaaggtatcgtattcaaaatctcctggccgcccattgtctaacgtataagcgaattctacattaggaaaatcagctggatcaaaatattgaccaccacagccaatttcttcgtctggaccaaaagcaacaaaaacatcaccgtgttcaatttcaggatgttcagttaaatatttaagcattgctaatgccccagtgattccagccttatcatcaactcctagcaaagtatgaccatcagaagtaattaaggtttgtccttttagatttaataagtctggaaactcagttggatcaagaacaatattatctttctcatctaggataattttctgaccatcataattttcgtgaatttgtggcttaatattaactgcgttaaagtctgcagtatccacgtgagcaaagaagccaataggcgttaccttttctgctgtgtttgcacttaactttccaattgcaaaagctgttttttcattatagtaagcatcaagcccaagctctttcatttcctttactagttccttggccagctcaacttggccaggtgaggaaggaatctgatcatgatgttcataatatgagcgagtattctttttagctaactgaataaaccgtttttcttcataatctaaattataaaaactcatatcatattccttcttacattaattccatcgtatcacttgaaactggctcagacttgggatctgaccaccacgactctttaactgttttgataattttaaaaccatgctttgcatacagcgctttagctgctatatttgcgctaaagacttctagcctaatcggccgtctaatatttggtaacactgaagctagcaattgatcaccaataccacgtcgttgaaattgaggatcaatataaaaataagctaaattatgtggcttatacgcagcaaagccagcaaattcattattaacttctacaatcctaatctcagaatcaaagaaattataccagtatggtgcttccttaaacggaataaaatatttctccactccgcctattttcatttcttgcaaacgagccgcatcatgaacccggcacaaatcttcgtaatctaaactttgaaaacatctagttcttacttgcataatttactcctttaggtgaaagagttaataaatttttatttttctttaattatacagaagtgaattatacatttaaagattttagttccaattcaaccagtcttcatcaaaaaactcaactttttcttcctgtgattctaatttctcttgttgcatcatagctattatcatctcatctttctatttttagaccattagttcgcatagaaattatatcaaacaaaggttcatctttctactctttttcaaaaaaatattaattgagttagtaatagatgtgaattacctatatttttatccacaatcgcgataatatcgggcttcagagccatgtttcacgtttattgtttacatttagctgtttttccaagtaatcaaatagcttttcactttataaaaattgtttcataaaaaaggatccaacttaatggatcccttaaacatgttattcgtaaataattacaggttcgccctttttaatattgttccaaacgcttcgaatctcacttggtttaacattaacacaaccatgtgagccaccctttaggtaagcggtcttgctccaatcagtccgccaagaggcatcgtgaaaaccacagccacttaaggtaaatggcatccaatacttaactggagaagcataacttgaaccatcatcattggtcccacgcaatgtacttggtgattccttatagtggatataccacaccccacgcggagtttgatcacccttagaaccttccatagtaccggtaacaacatcacgaagatgaacggctagtttaccctttttgatcaaccatacttcttgctttttcaatgatacaacagcataagtatcaccaatctctttatttgaataaccatagccgtgaggataagtgctgtagcctaaaccgtaaagtgcatctgcaccatcaaaatttttttggcctttggcaaatgcttcgagaagtaagcgttgcgtctttttaacataaacgccccaaccccaagtcttattctttaccgttatggttttgcctttaactttattgccctttggcactgtaaatttatagctcttgtgtaatgttgaaacttctttatcaatttgatttaacttagtcgttaatttactagtatcaccaaattgatagcgattatctcgataagtcacattattcaataaatctttggcctttaattgatagtttttgccattaattttataagtaatctctgctttgcttaagtcagttagtttctttttagctgtagctaaattactagtagtaaacttataagtctgagtcgatggaattttagtttgttgcttcttaaaaaaggcctttgtctcggactcatctaatgattggactgtagtgttatagctataaaccagtttgttattttttaactcaacttgatttttagctttttggttaactttagccattgccttagtaacggttagctttcctactttaactccatcgattgtaacattagggttaaagtgagttttagcatatttttctgctgcagcttgtgttgccacacggtgattatgaatgccaaaacccgcgattactccaacgataattaaaactgcaatcgttaaaataataatattgtttcgtttattctttttctttaggtcttcgttcatactatcctaccttttatgccagtaataatatctttaatatagcaccttgcaaatttcgtgtaaaatctattgatttatctaaccttttttataattagacgactagcatcccgcaaagcaaaatataaaattggtgtacaaattgcagtagaaattgaattgattacagttgcaggcaaactaacaaaggctccaactaacgctactttaaagctcgtccccaccattaaagcttcaacaattgaaacgcaataagtagtgaatatcttagttacccctgcaataatacctaaaataataatatttcttttactatcttgatagtgcattcctcgataaactgctgtcaaaaccgaagccactactactacctcaagcatagttaaccatgatgttgcggcatagccatttaacaaatcaaaaccacctagaccaataattcccgcaatcataccattacgataacctaaatataaaattgctacagcagttagcgtatttccaaaatgaataaatgggcgtcctaccatagcaggaacggggattcttaacacccagatcccaatataaataattgccgcaaaaagtcccgttaaaactaaagcttgtaaagaattcttgttttctctaaatatctgcattattaattattactccatctcttcagtaaatctggtaaagctgctgcataatttggtcctagacgtgaatcttgcttgggtgtttccctgattgcttgtgcaacaaaatcggccgcaattgaacacgctttttctaaattttctttatgcattaaagcagcaaaaaatgcacttgcaaacaaatctcccgtaccaaaataattacctgggagttttttctgaattaaagaccaactatgatcggctgtaattccaacttccgcaattttttccttattaagtgaaataccggtaattatgacattcgagacaccaaattgactagataattcagccgcaaattctgttgctgttttcaatgaattactagttgcctttttgcctaataaaaatgctgcttctgtcatattcggcgttaaaatcgtagccgacttaactagatttcgcatctttattacatagttttcatcaatgccacgataaagttgaccgtgatcacccattactggatcaatcaagatcaatttatttttttgtttaaaatagctaatcttttctgtccaaaaatctaatgctcttttgcccaaatagcctaagtatacagctgaaaaatcaaaaccaaccttttgccaatgggccataatcttagccatttcattattcaaacttaaaaaagtattctcaccaaagccacccgtatgtgtagacaaaattgcagtaggcaatacggtcgggctcaagccacatgctcctaaaacgggtaaagctgcactaagtgatacttgaccagcacaagataaatcttggctaactaatacgccaccattaaccatcttttttactccaatcaaaaaaaccctgctttaagcttaacatgaagtttaaagcatgaaaaattttattttgcgctaaatgtattagccttgatatgattcaaaatttgataaccaatttgtttatttctgttttcatcattttgagtttgatttaagaacataatcaaaccattttgattatctgtagtcatctgaatccagttaccaaagtgagtattatataagttaccatatgctaacttcaagttatcattattcttcatatataaaccacctgaataaccatttgatgaacgtgatgttaaatgagtcatataatcaaagtctgttcgactcaaaatttgcccattggttaaaccaagttgaatacggtaatagtccattggagctgagaacaaattaccagcacctaccaattgagaagcttgagtctttttaacatattgagcccattggtaattcttttgattccaggtatatgagataccatccgtcatcccggctggaatatcttccaagaaataagttcgctttaagccaagcttattaataattcgttcctgcacattttgcttgtagctttgtccagtttcttgacgtataattccagctaacaaaatatagttggtattattgtatgaaaaattaccaggttgattttgcgtagttgagtttagcttattaacaacccaattaattgcatcagcttctgaataaacacgtcctctatttacttcagtatcagctgctgtcaatccagaagtatgcgtcatcaagttgccgacggtaatattatcagcaccttttaaattaggataccacttagagatcttagtatactgtgtaaacttccctgcagaaattaattgagtgataattgcgccggtaattactttttgcaaagaacaaacaggataaactaccttactgtttcccgcacctaatcgcttgccataataaccataaccataagaaatttgttgtggttgtccatcttttactataactacggtaccacgagcataataactagctaatgtatttctaacaaagctccgcatttcagttttgttataacttgctgcctgaactgtcgagctattggcattagcaattgccattccaacaggcattgaagcagctatagttaaccaaatggttgatttgattaatgttttttttaaattaatacgtttcgttttaaattcccccagcaatgttatgtaaattctacccataatattagcatttatttttttcattggggttacaattttgataaagaatcaatgagaacgtatacattttctttttctaatatggataattatttaaatgatcttgatcagtaatctgacgtattactttagccggtacccctagtgccaatgaattatctggaatatctttagtaactaccgatccagctccaataacgcaatttttaccaatttttacgccgggacaaacagtaacattgctggctaaccaacaattatcgccaacagtgatagctgctccatattcaatatcggctatttttccgtctgattgcttgcgagcatttctttgagttggcaacaaaggatgcaatggagtcgcaaatgttacgttaggtccacacattacattatttccaattgttacgggacaagtatccaaaatagtcaaattgaaattagaataaaaattatctcctaagtgtgtaaattggccataatccacttcaattggtccttgtaaatatacattttgaccatgattcggaaaaagacgatcgataattgctttccgttctacctcatcttcatcagtagtcatgttgtaatcacgtgataagcgatgagctaaactggaaatctttttcagttcttcagtatctgggcgatatggtttacctgccaacatttttttagtattttcttccatcgataaagcctactttctaatttaatcgcttacttaaataaatcatgtctactagctgatgtccagcttcaaaaatcggatgatcataattttttacaaaaaaatctttgatcttacctgagcgtttaaaaccacatttttcataaaaaggaatagttaaggggctatcacccgttccaacttgcaaaatttgatatttattttgatacttcttagcaataaaattaatcaaatgtttagcataccctttaccttgatcttctggataagtggctatattttttatttctactgtattaccattttcaaccgtaataacacattcagatctaacttttcctttatcaatcaagatatacataattccacgttctaaatagcgatcaatcatactctcttgttcatcagctaacaaaagtaagtctatatactgcttcttattagattttatctctttaatttccatgattattttccaattaatttaaaattttcgtaaattgcaataataacttgaacacttttgtttaggctgtttgatagatgcgatctaattctctttcaaagatctcatctggtgtatgataagccaagatctttcttggcaatgaattgcaccaagtttcaatattaatgatttgttggagagagtagttatgaatatagtcacctttaggaatgaatctgcgaataaggccattatgcctctctacagtgcctttatcacaagaagtatatggatgagcataataaactagtgatttggaaatatcttccagctgagatagatccgcaaattcagaaccattatcagtcgtaatagttttaaagatatcgttccaatgctcgctgtattgcttgcgcagacttttaaaggcattcattacactggcagctgttttatctgggattttaataattaggaactcacggctcatgcgttcagacaaagttagcagcacttcgtcgtccttggtcttatggcctaaaacaagatcacattcccaatgcccaaacacatcacgcttattaacttcctgtggtcgttgttcaatactgcggcctagcttcttcttatttttacgaatgcgatgaattttggtattgcgcttgagtttctctggcaaatcatagttatggatgtttaacaagccttgatcgacataattataaagcgtcctagtgcagacaatatcgttgctggtaaattcccctacagcagtgcagcgattactgcaggcgtcgagcgaccagccatcttcaaaaaagtgctgttggacgtaatcaataaacttatgcttcttaagaaaatccgatttgcgtccacagtatcgacgattgttttgataaacactctgaccttgttgggctttataacgtttaactttaccgtgatacagcttaacagcccctcgtttgatctcatagtgaattgtactaggggaacagccaatttctcgagcgatggaacgcaaagaacaatgatctttcaaacgagtttgaataataacccgctcttcaagcgatagatgtgttccttttttacgcttgtccatgatagaatgtagtgagtccattttgacctccatagatgtttttgtggttattaacattctatcaaacaggtccaaatggacttttttattttgtatcaagtgttcaatttaattttacaatcggcaaatttaaaatttttctctttctactcatattctatgataaactcattattgttataaaaataagtataaacgaggaaaaaatgcgcaaaaaaaatatttattctatttgtatcggattaccgatctttttgattcttgcattctctattatggctcatgcaagttgggttaccggctttgacaatttctttgaaggcttagtccacagtattcctaatctgcagagcattatgcatgtaattacatttttagcagatactaaagttgacttagtttggatgctgttgatagctgtcattctttggctgaaaaagcagcgtcctctttcggcaagtattgtcatttcactagttacagctgatgcttttggttggattgttaaacatataatccaacgggcacgaccaactgctcacttagctgctgatgatggcttcagttttcctagtggccacacattaggaatggcgattattgttttctggctaatactaatattgattccagctttagttaaaaataaaactgctaaaatctggctcactgttttattagctatttggcttgttttagtaatgatttcaagagtttatctctacgctcactggccaagtgatgtttgcggctcagttgctatgggcttaatgtggattggcttagtagatgcaatttgggataaagttactccacaaacagacaaaaataatttttaagattaaaaatagtcgacgataagtcggctatttattttgggcaaaaagaaaaagtcactaaggaaaatgtccttaatggcttttctacaccttcaaatttcttcctatcagcagatgtcataagaaacatcttgcttagccttttcatcctcggagcgctcatcacacgctccgctactatgatatcaaataaaaataaaaagataaagatttttacttgataaatttcaaaaaaagtatatgaattattaaaaatcaaatttgtatattgctatcatttttaaccttttttagctccgatttaactgatttgcttttagcattgttaattgtcttaaaaaaggcggaaatttggccaatttctttttcggtagtcgaacaacagccacctattattctagcaccatgttcataccactcttggcttaactttttaaaatcgaattttgcattaaatggaatccaattgcgctcaaattcgttataaacgccacccaagttaggataaatgacaatttgtttatcagtaaaatcatgaattttatcaattactgcagttgctaaaaacggtttaaagcaattggctccaatcgcaaatacttgatcatattcattaagcttttgcactacccgctttaaaggagtgccatcactaattttagttgtatcatgcaatgtaaaacttacatacactggaatttccggagcattttcctttaaccaatctaagattgctacaacttcatccaatttaggctgagtttcaagtgcgagacaatcaggtttatttgccaataaaatcttcaatcgtggtaaatgaaaattaagatattcctccgttgttagagaataatctccgcgaaattcatccccttgagctaaatatgcaccataaggtcctactgaagccgctacataattatgaattcccgttgtctttgcaaaatcatcacgggcttttttggcaatttgaactgcattagtaatcaatttagtagcctggtcttgtgtaaaaccatgtttttcaaaagctgggatatttgcttgataagtatcagtaattgccatctgggctccagccttaaaataattcatatgtacttgataaatttgagcaagattatgttctaatgcaattgctgtccaaagttcattatttgtatcaatgcctaacttctcaagagctgtagacattgcaccatctaagattaatcctcgatcacggatctgtttgagcaaattcatttttctcaccttagtataaattgagtagatagttaatttatatttaatattacattaatcttagatctgtttcaaatattatttcttcctatgtcttattttttagctacagtttgctataaatttatttaatgctattttcatataatattaaaatagatttttgaaatcatgtaaataattagccaaatagtgtgccgttaaactttcaggcttttgctttaattctaaaggcttaccctcttggacaatccgaccaccgtttttaccaccacgtgggcctaaatcaatcatgtaatcacaattgacaattaaatttaaatcatgagtgattgtaataatggtagctccctgatctaacaacttttgcattacttggaccagaaccttcacgtcaagaggatgcaagccaatcgtaggttcatcgaaaacaaacaatgtatcattttgtttatgactaagatgagtaacaagtttaaggcgctgagcttctccacctgacaaagttggtgtatcttctcccaaatgtaagtaatccaagcctacttcttttaacaattttagctctcgttcaatcttaggcactttaacaaaaatcggtagagcttcattaacatctagatttaggacatcaacaattgacagatcatgccacttcaccttttgtacatcttgattataacgatcgccatgacaggttggacagacttgttgcatatctggtaaaaattggatgtcaagagtcacaattcctgtaccaccacaagtaggacaagctccttgtttattattatatgaaaaccaacttggcgtataatgcttctttttaacgagtggctgactagcatataactttcgtaaattgtccataattgaagtataagttgctacagttgaccgagtacttttaccaattggagatgcatcaacacttactacatttgaaattgggctagaaaagctactaatttgttttggcaatttttcactttttctttttgctataatagcgggcactaaactatccaaaatcaaactagttttaccggcacctgaaaaaccagttactgcagttaattggtttagtgggattttagtttttacatcatgtaaattaaaatattgctttacttcaaatgaaatagaatcggaatttatttgattggctggctctctggcaagtagcttagcactgccatccaaatatggtcgaattaaagaatgctgatcatgtttgatcgcagtaattgaatcttgatccaaaatctgaccaccttttttacctgaacctggtccaatctcaattacttcatcagcggctttaataatgtcaacattatgatcaacaactactaatgaattgccctgagcaactaattttcgtaaaaccttaattaatcctgcaacattagcaggatggagaccaatagaaggctcatccaagacatataaaactccagtagtttcagtacgtaatgttcttgctaattgaattcgttgcaattcacctgtcgataaggtatttccacttctagccatagtcaaatagtctagccctaagtctaataatggttgcaaattatccaaaaactcctgaataatcgaatgagccattttatgcatattagttggtaaagttgcttgcacatctttaacccaggtaactaaatcacctaactgcatttcggccacctgattaatattttgcttaccgatcagctgttgtaacaattctggtttcaaacgactaccatgacaaagtggacaagtcgaataagtaaagaattcggctattcttttttgcgcacgttctgatttgctactctttgctgaacgatagacagcttgccgagcattttcatataaggcattaaaatcatgaaataccctgccagttcctgataaaaagtccattttatatttcttttcaggaccatttaagacaaaatctttttctttatcagtaagatctttataaggaatgtcgatcctaacaccagcatgttctgcaacgttaggcataaagttccgtcctggcaagctccaagatgcaactgcaccatctttaattgacaaattttcatccgtaatcagtttagattcatctagttgccgtaccttaccagttccgccacactcagtacatgcaccatctgaattaaaagcaaattgttcggcacttggtgcataaaattttacaccacagactggacaagttaattgtcccatttgctcacctgacatactcattgcctttgcaattgccaaactcggcttcaagcggtgtccattaggacaaactggagaacccaaacgagagaaaattaagcgtaaaacattaaaagtctcactcatggttcctactgtagctcgctcatttggtacacttggacgctgccgtaaagctaatgcggagggaatatgtttgacgctagttacatcaacctgatttccctgtttaattcgcctacgcatataagttgacagagcatcaagatagcgtcttgaaccttcttcataaagaatccccattgctagtgatgattttcctgagcccgacagtcctgaaattgctacaaatttattcaaaggaatgtcaacgtcaatattctttaagttatgtactcgtccgccacgaacttcaattttcgttggaatagtcattaaatatccctttccatatttagtcattatctattttaatttataatcatgaattaccaacaagcaaaccaatttttgagactgtaaaatagtttgtgtaaggatgaatgattccttaaatttatttctttaaacattagaaaaaggagttcctttctcgtatgattggtttgaacaaaaaaacacatacagaaagaagaactccttcatgaatgattttaccaaagattttgctcaagctctattcaatccagacaaaataaatgatttattgcgcaaagagctacaacaggctgttaataacttgttagaagctgaattgactgcctttctgggctatgatccctatgccagaaatggctggaatactggcaactctagaaatggtgcttatttccgcaaagttgatacgcaatttggcccaattgaagtgcaagtgcctcgggatcgcaacggtcaatttcatcagcacacgctgcctgactacaagcagcactcggatatcttggaaagcatgattatcaagctttactccaagggcgtgaccaccagggaaatagccgatctaattgaaaagatgtatggcagccattacagtccagctcaggtatcaaatatttccaagcagatgattccaaaggttgaggcttaccacaaacgcaagctaagcgacaagtttttctgcgtctatttggatgcgacataccttcctttgcgccgagaaacgtttgagcgtgaagcagtatatattgccattggcattaaacctaatggacataaggaagtcattgactactgcattgctcctagtgagaacattgaagtctggacagagatgcttcaaaacatggagtccagaggcttgaagcaagttgaactctttctttctgatggtgttgttggcatgaaaacagccttggccaggacttatcctaaagctcattttcaacgctgcctggttcatgtcatgcgcaatatctgtgctaaagtccgggtggatgaccgcgaaaagatcatgaacgaattcaagcagatacatcaacagacaagccaaaaagaagctgcagctgtcttgcacaaattctatgccagatggaataaagcttatagcaatgtcatcaaaggtttgaaggaaattgagcccgatctgctggtcttctacaattatcccaaacaaatcagagcttcaatttattcaaccaatatgattgaatcctttaacaacgtcatcaagcgtaaagctaagcctaaggcagaatttccaactgaacagtcgcttgatgcatttattggcatccaggcaatgagctacaatgaccgctatttcaaccgaattcataaaggctttggtcaggttcaggataccttagaatcctactttgattaaataaataattaaaaaatcaatttgcgagaaagaactatttacacaaaagatttgacaggttccaatttttggaaaattatgacaaaattactattaaaaatatgtgttatatgatatattataattagataaagtgagcgcttacttttaaaagacatagaaatgaggtgttgttgtgatattgattaaagaaaccgctgttttttcttttgatagatataaaaataccacatatttagagacacccatcaagctaggagtcatgcgtaacggcgcttgattcgtgtcctaaataaaaatgagggttacattttgtaactcttatttttgttcttaaaatacaaaagaaaatcagtacaaaacacggagtttgtactgatttttaatattctaaaggttaattatttaacccaatcgcggacttcactatcatcacgtgcaacaccaacaacattcagaccattagcccattctttaaagtgactgacataagccttatggttagtgcctgctgaggtaaagaatgatgcaacttcaccacggtagtttttcatcttttcaagtaatggcttaattggagttgcaggatagcctgaccaaacagggctaccgactaaaatcaaatcataattattaaaatcgatatcatccatttgaatttcaggataaggaaccttaccttgaatttgatctagagcaatatcgttggtcttgtacatatctgaatcaaaagcgtcaggagcaacagttacttcctttaattcgctgttttcaatttctccgttaatctttttagccatgttcttggtattgccttcccaagaataatagataattaatgtttttttagccataaatttagtccttctttcatttacatttattgtaataaaaaaagaccggtttgaccaatattttaatattattattttagctattttccttttcttttgattatttccatcatagcctgaccatactttttcatcttcgcttgccctacaccacttacctctaaaaattcactttcattttgtggtttaatttgtgccatatcgtgcaaagagcgatctgaaaaaatcataaatgctggtactttttgctgcttagctaattccaaacgcttttgtcttaaagcttcaaataaagtatcactttcttcaccagcatgagtagtagttactgaaatcttagcaattcgccgtttgactacagttttgccatctagtacatcccacccatgattagttacatgcactagtggatatttgctaccttcaacttctagataacctgaagcaattaaatagtcaatcaagcttatagcatctttttgcttcattcttagagagccaaaagacttatattgtgtagcattcatttcttgcatgcgctgattttttgagccaatcaaacattgagcaactatcgtttttccaaagcgaccatctagttcataaaccatactaatcactttttgagcatcaatggtaatgtcagtcaatttatcctgatttagacaatttgagcatttaccacatggcggacaatcttgaccaaaataacggacgataaattgctgcaaacattcaccagtattagcataatcagtaattgtttgcaacttacgatattgcagttctcgatatttatcatccgcatctgattcatcaataaagtagcgatattgacgcaagtcaccaggatgatagattaaaatcgcttcgctttcttccccatcacgacctgcccgacctgcttcttgatagtaactttccatattacgggcacttgaggcatgaatcacaaatctgacattacttttatcgatccccattccaaaagcattagttgctacaattacttgaaattcatcaaattgaaaagcttcttgtacttgacttcgttctgaagaatccattccaccatgataagcaccaacagagattcctttcttagccaaataatctgtcaaactttcaacttttttacgtgtattagtgtaaataatccccgctttatcctgatgtgccttaatatattctgaaatatataatggagtattttgtggtgagttgaccactttaaacgatatattagggcgagcaaaagaggtaacaatcatattctccttgggaatattcaattgttcacaaatatcatcttgaaccgcaggcgtggctgtcgctgttaaagctaatatatttggtctgctttttagtgaattgattccatctaataattgacgataagcaggtcgaaaatcatgtccccattgtgaaatacagtgtgcttcatcgacagcaactagatcaatatctaaaaaatttaactgatatctaaaataatcaatcgctaaacgctcaggtgtaatataaattaacttaattttgccttcatatgcctgacgtaaaattggattaacctcttcttgcggtgtagtagaatttaatgctgccgcattaattccattttgctttaaattatcaatttgatctttcattagagaaattaatggtgaaataaccaaagttacaccgggattaatcaaagctggtatttgataacacattgattttccgccaccggttggcataaccgctaacacattttgcttttttaaaactaaatcaattacttgtttttgacctgggcgaaaatttgtatagccaaatgtatcttttaaaacttcttctggattcataaacttatcctaactagttaaattgctactttttattctaaattaacaattcaccccaaacaagataaaaagattcacacttttaaataaagaaaaatgtgaatcttttagagttaaatttacttataaaaggtttcttctactgcatgagtaatcgcaatcttatcatgagcataggacaaaccgccctgaatataaagcatgtatggttcacgtaaagggccatcagaagaaagctcaattgttgatccttcaacgaaacttcccgaagccataacaacttcatcttcgtaaccatcctgatgatatggaattgggtcaacaaatgaattcattggtgaatagtgttgaatagccgcacaaaattttaccatcggatcaggtttaccaaaagtgacagtttgaacaatatcactacgtggatcactccatttaggtgaaacctgcatccccatttcttctaataaggctgcagtaaagaccatacctttttgagcttcaccagtagtatgagctgccataaagaatccttggtagatatcacgcaaataaccccaagttgcgccttcaccttttccagctcctggcactgtcaaccgtgaaccagcaccatcaattaaatcctgccggccaactaaaaaagcaccgccttttactaaacccgcaccagcatttttataaagagaaccagccattaaatctgcaccatagaaagttggttcttcacattcagaaaattcaccataacagttatcaatgaaaatattgacatcgggacgaacttccttaataaacttgagcattggcttgatcttagccatggtaaaagtcttacgagttgcatagcctaatgatctttgaattgccactactttaattgaaggatccatgatatcttttttagcttgatcataatcaacctcgccgtcttttaattctgtagtcttaaacttgatgccccattccttcatgttgcctggtttattgccagctaagccaataacttcttgaatagtatcatatggtgttccagttaaataataaagggtatcccctgggcgaagcatgctgaaaagaccaactgtaattgcatgagtacctgagccaaattgtggacgaactagagcatcatctgttttaaaataatcggcataaatatcctcaattttatcacgacctatatcgtcataaccatagcctgttgatggaactagatcttcttcaccaacatgatgttttctaaataggtccaatacacgttgttgattatacaaaacctgttcatcaattttttctaaacgaggttgaatcattgattcaactttagtcactttatcgcttaactcttttggtaaattctctttccaagaaaaactcatttttaactccctatttatttttgattacttctgcttgtacgcataaactaccattattattttcgctcagatatactccctgaatctctggcacaaaaccaggaaacttttcaatagcatgcgccaagacttcaaagtacttttgatctaccgttccccacttttcaccgggtgcaacaatgaaaacacctggaggatatggcaaagctccttcggcagcaattcttccaacaacattttctaggttgaccagttcattttgatcttttttaaaaagctgatcagctgtagctggtgtcatttgatagtcttgcatccctgatttagaaaatagcttttgctgtaatacaaaagtattattttcctgatagtactcatgcatttcttgacacaactgtttcagggtatagccttgataacgctttggatactcattatataaaaccggcaaaacatctttcattaagtcatcttctagatagtgtttttcaaaacttaaaaaagcttcaagtaaagtatctagttctgcttgactatctcccggtgtaagtaaaaacaacaatgaattcaaatcatttttagctcgaataatatgattttccattaagtattctgccactaccgcgcctggaatacctgttttctcatattttgcatttttaacatcaatcccgggagtttttaccgtaatcttcaatgggtcaatcattgcttcgcctggaaccattttacggaaaccgtgccaatccgtattttgtcccatttcccaatattctgcattggtagccaattcatcagtcgaaatttcggcaaaattgtcaggaactaatggcttaaatagcttagactttttgagtagttttttccgccattcaattcccattcgcagagtttgatcccaccactttttatttcctgctccagcagtaacgtaggaattaactgttaatgaagcataaagtgggtatgcataactggaagtaacaaacttcagataagcatgattaaagtgcttatgatcaacatatcgtttttgtcctttaatatgagcatccttttttagaatctgtgacgcttgagccatacctgcttgctgtttatgtaatgactgagtaaccaaaatacctggatcatcaggacccaagttaagtagaagtggtgataaatgtctcataattggcacgaattcttcaaagccgccccaggcacagtcaaacagaacataatcacaaagtttaccgattcggtcaataatccactgtgcatcataaaagactccatcataggtttctgcttgtacgattgttaacctaaatggacgcttagcctttgcctttgccggatctatcttagctacttcagctctaattttatcttcagttaagaaggctggatccatttctccaattagtccaagtgcatttcgatcagttggaatgtagaccggctttgctccgctcattaccaaggcagaattatacaaagatttatgattatttcgatcaaataaaactagatcgccttcagataaaagtgcacttgcgcaaatagaattagctgaagtcgttccgttggtacagaagtaaaccttatctgcatgataagttttagcagctttcttttctgcattaagtggcgttccagcatgcgtcattgtatcccctaattgaggaacagtatcacttgtatcggcaaacattagatttttaccaaagaacttattaaaaactactccggcaggatgtttgtcataatattgcccattatggtgacccggtgtagtaaatgaaattggttttgcttgagcaaaattgatcaagtcggtcaaaaagcctggcaccatttgcttttcatattctgtagctttctgagtgacttggtcttcatctacctgatcagttactttaatcaatggaatcggaaagccagattgttctcttagagcttctgcttgttttattcctaatgcatcatcatttttgacaacaattgcggcaagttcagcactattttgtacatcgccaattggaattgacgaccaacctttcatcttattaacattgacgccatttccaatggcaattttcaaaaaatccatcctttttctttccattttgtccacgaaaccgttttacatattgcaaaactttaaaaagtctttataatttttctacagtatagcgtactttttgcattctttcttaaaatacgctacagctgaaattattatataaatattggaggtttttaacaagtgcatttgccttgctcgcctccgagaacagctatgtcaacacaacaataaaatagcttaacttggaggaatttttatgtcagaaacaatcgaaacagtcaatttcgaacccggcaaaaaacactacatgtcatggccggttattgcattgatcgacttcgtaacgattatcagttttgaaaatattttttatccatttcaaaatcaaggcttatcagtagttgtatcttggattttcctactcttcgcctacgttattccttatgcattgatgtctagtcaaatgggcctaacctttactgatcaagccggtggattggcatcttgggtacgtcattcatctaacgatacactgggctactggacttcatggatgtattgggttcaaactgttccttatttggtcgatgtttctaattcagttattgtgtccttttcatggattattttgggcaacaatactttagacaagcatatgtctactttttggtttgggattttgacctttgtcattattcttgcctttattttggttgaaaatgcaatcaagaattcacttgaactactatctttaattggtggtggtgcaatgtttattatgtctatgctctttgttttacttgctgtttggtcagttatgcatggacaccatattgctacccaaccatttaacttggccgcatttaagccatcatttagtttacgttacttttctaccactggtcttctaatcttcgccatgtctggtgcagaacttgctgctccttatatcgtacaaatgcgcgatccaaaacacgaatttcctaaagcaatgtggatgttggctttgatgactggattcttgactatcttcggtactttggctttagcaatgtttttcaatgctcatcatattccacatgatttcaagatgaacggaccttactatgcatttcaactactaggcgaaagccttggttggggcaaagtattaatgtacatctttgctgttgttcaagccctctttatgatggcccaattagcagttttacttgatgcatcaagtcgtgtctttgccggtgacgttgccgacaaattcatgccaaaatggttaactgggaaaaaagacaaaacaggtcgtccagttcactcgtacactttaacttgtggtttagccttattcttgcttttacttactgggactttgccaaatattaattcaatttacaattggcttttaaatatcaatggtattatttccccatacaagacttgttgggtattcttcgctttcattatgttacggatgcaccaagagaagttccactcagattatgtcttcattaaaaataagactggtgcccttatcatgggctggtggtgcttaatctttacctttatctgtgctactttaggatttattcctcaagaagcagaagcaacattcggtagcgcagcctttaatcaccaattaattatgaatattattacagttatcgtactctttggcttaggcttcttactaccatacttaagaaaacgcgaagaacgtaaagaaatgaatatataaaataaacatgcttcgatcagttcgaaaatcgaggcatgtttattttattattctaagatttcaacctgcatcttactaggaacattaacaaagtcgaattgtttttgaaaaacatgatcaaaccgtaaatcataaacagaaccaataattggtgttaatgcaaaagctcgtaaagtgttcatatctttagttttattagcataaatatgatgcattggtggtttgattttataaattcgttctaaatattgtggacttacctcatcaacatagccttctagagtgaaaccaatgctagtgagagtttctcttccgcgcaaagcggtaattgaaactttattgtgtcccttaatatggcgataaaatgacttctgattagtcgttgcaaaaatcagacgaccatcttcattaaagtcaatatcgataatattggtatgtggatcaccattttgatcaacggtaccaaaaattactgaatggaaacaatcaacgattagatctaggaattcgtcgttacttaaattgcgatcgagttcaggaacatgttgtctcataataatctttccgtttctatatactttctgtaatttttatctatattatttcttatagtgtacatgacacgattaactaaaaacaactttaatgctcattattttcccattttaaatgtataattgtttaatattaatttttctggtaaaatttcagctaacaaaaaataagaaaagaggcagaatatgaatttagactataagaaattggcccaagccaaaaaggacgacattcttcgtgatcttgacgaattaatcgcaatcgactcatctgaggatttgaataatacttccgaagagtatcctgttggtccaggtccagttaaagcaatgaagaaattcttatcgtttgcacagcgtgatggtttccatatcaaaaatgttgacaagtacgctggccgtgtcgactatggtactggtgaaaaacgtttaggcattattggccacatggacgtggttccagctggtgacggctgggtaactgatccttttaaaatgttaattaaggatggtaaaatcattggtcgaggttctgccgatgataaaggtcctgccctagctgcatattatggcatgcttttacttaaagaagctggatttgaacctaagaaaaagattgattttattgtgggaaccaatgaggaaactaattgggttggcattgattactacctaaaacatgagccaacccctgatcaagtattctcacctgatgccgaatttccaattatcaacggtgaacaagggatctataccctgaccatgacctttaaagatgacaataaaaagggatcagtaatccttaagtcattcaaggccggcattgccgaaaacgtaactcctcaaaaggcctatgcaactattgttggtagtgatttagccacaatgaaggaaaaatatactaagtttttatcagataataaacttgaaggcgaattcactattgagggcgatgaagctaagattgaattaactggtcaaggtgcccatgcatctgcacctcaagttggtagaaatgcggctacatttttggcagtatttctagatcaatttgattttgctggtcgcgataaaagctggcttcatttcttagccgatgttgaacatgaagactttaacggcaaaaaattaggcgttgctcatcatgatgacttgatgggtgatctctcaagtgctccatcaatgtttgactacgaggaaaatggaaatgctgttttgaaagataatattcgctatcctcaaggtactgatccagataagatggttaatcaagttgaagaaaaatttggtgatatcttaattccaagttttgcttcatttgaagaacctcattatgtacctggagacgatccattagttcaaaccttgctcaaagtttatgaacgccagactggtaataaaggtcatgaagtcgtgatcggcggtgggacttatgggcgtttatttaagcatggagttgcatatggcgctcaacctgaagatgctccaatggttatgcaccaagcaaatgaatatatgaaggtagatgacctaattaattcaattgcgatttatgccgaagctatctatgaattgactaaggacgccgaataaaaatttttacatgtatcaaaaaagcttatatactgatcttgttttaatgcagtatataagctatagaaagttgctagtgtcatatatcactagtgacttttttatttttccaataaaacttcttcattatttttcttagattttagccaaaaatgatgtcccaagtaacaaatagctacaaaaggaattgtatagtacaatgctactctttgggttggatcgaaccagattaatacacaagaaagcaggcttgatataaatgcaaaatatggaattacaggataccatggggtcttgtacttcaattcactgagttgatgacctgagtttaaaaatgcccttctaaacttcaattctgaccatgcaatcgccgtccaaacgaatacaacagctaatccagaaatagaaactaatactagataaaccgtcgaggcagcaactttactagaaatcaaagcaaaaattccgtctaacatacttactactaatgacaatactggaataccacgcttattagttttggtgaatgctttaggaattgttccttcgttgcccaacgaccaaagcattttagttgaagcatacaaacctgaattggccgcagaaataattgcagtcaaaactacgaagttcataatatttgcagcaaatggcacatgaattaggtcaagcacatacacaaatgggctttgagttactccagccgtatgataaggaattaatgcggccataactacaattgagccaataaagaagataattaaacgccaaagtgttgtcctgattgcttcaggaatagctttctgaggattctctgcttcaccagccgtaatgccaataagctcagttcctgaaaaagcaaagtttactgttagcattgttgtaaatactccaccccagccgttggggaaccagccatttttataaaaattaaccaatcccaatgtgcttgataaactttgctcaactgatcaatcaaagctgttgcggtccataatttattattagtatctacgccttgtttttccaattcatacgacattgcaccatctaggactaatcccctatttttaatctgttcaagcaaacccatttttttcatgctgtcaacattattttagtaaatttcctaaataatagccgcaataaactagaaccaagccacccagatatgatgacaccgcgtagaatacaagaccacgataatttttactcttataaagctcaactaattctgtattcatagtggaaaaggttgtatagccacccattactccagttcctagtaatgcataaataaaagtgttagcaccaattccaaaaatcaagcctaaaattagtactccagttaagttaataaacaaagtcggtgtaggtaaattagaaaatttattaccaatccattcccaatgctttttaccataattagtaatagcataacgaagcatagctccaattgatgcaccaattcctgcaagcaaaaaattcatcgtgtattcctttcctttcttactaattgaccaacttttttaccaattttcattcctaacatagcaaaaaaaaagccaaaaataattgagctaaagtaataaattactgcttcgattggcaaattagcctgcatattttttaaaacatcaagattaaaagttgaaaaagtagtaaatgcacctacaaagccagtacctaatccaactacaagccactgcctaatctctttagtttcaataaaaaagtaggtgaaaaacgctaataaaaagcaacctatgacattaccccaaaaagtaccataatagctgaagtttgcatttaaaccagcacgtgccataccaccaaaaaaggcgaaaatagcgatactaatgtaattaataaattttgaattcaaacagattcctcccacaaaaaaacgtctactttacccctatcggataaagtagacgtcattagattttactcggttaatggcgaacgtcatcgcctattcagttgacagttatcatcatacgacttttctgtttggttggcaagttgtattgtgtgcgtgtcgcaaagcgacacgcagtttgattatttaataaaaaaatttagtaacaacgtgcttgaaataatgtataattatttttaacgaatgtttgaaaggagcctcaatcttgacttttccatatgaagataaatttcgcatttactgtaaacaacaaaagaaactagccgattcaactatttctctagcctgttcttcaatttcaactttttgggattattattctggtagtttagatgctactgaagcaaatgtagaaaatgttacaactggagatatacgtaactttttagattcacttgaaaataaactccatatgaaaagtaatacagtaaataaatatcttagtcacataaagatgtattttgtttttttgaatgaatatggctacatcattacttatccattgctcactttacgtggtaatcgcttcaatcgtaagcaacactatgttattggctgggaaaatcatttatcagaattaattcaaataaaaaatattcatcctgaaactatcaagatgatggctgctattgcttgtggttttaagccaaaagaaattatgattttgcatgtaaatgaattgttggtaaaagttaaagaaaatgatgtcagagaatatatccaaaatcacactaattttgccaataacgataatccctatctgtttgctcgccgcgatggcaaacattacgcttctgattttaatattaacccaaaaattgcccctgaccgttcaatagtcggcatgccattaactacacataagcttcggatgtcttatgtctactctgttttgtctaattcaaaattaagagaagcggattatattgaaaaattacatctttcaatgaaaactttaaattactatcgtaaaaatatgacactctatgtagaaaccagtaaatttgaattaaaaaaataaacaagcaaaaacgactacccattttgatatagtcctactttagtagacagtacaaatatacgcatggtgctagttaaatcgttttagttaataaaaaagtccaatcttgttagactcgacttgtaaatagtaataatagaaaagagtctgatctgattgaactgtcttaagcttaagcgttttagccaccatttacaagttagttttaaagatttagtgataatttgtcggcactggtatcgtttgtatgcaccggctgagtttactcatcggcgaaatattgatcaaattaaaactacggacagtctgattttggctttacttatctggcaagctaagacaggaattgaatcacaaagaagattctgtgaatgtttcaattgtttatcacactcacgttttaatcggcgttcacgtcagctattgcaattgatttatcagatacggcaagaaatgaataaaaaggttgacctgaatggacatttcttgatcattgacagctttccggtacctgtttgccaaccaattcgcaactatcgtgctaaaatttttcgcggttatgccaacattggttataaggccaccaagaaaatttacttctatggtttcaaagttcatgccattgttagcgatgacggttacattcttgattatgtcgtaacaaaagcatcagttcatgatgccaaggagacagttgaactgctggaaaatgcccatccatctaattactatcttcttggcgacgaaggctatttaggcaaagaactgcatcaacagctaaaacaaatgggttatgaactttggacaccatatcgtaaaaatatgacaggagctaaaaagcacaatgatcatcaattgatggctattcgcagaacaattgaaagcgacttttcgcttctgacctattacaatgccgagaacaatcgagcacgtagtctgataggctttcaaagccggttggaaattgcaattttagcttataatttggcttattgtctagaaagatttaactagcaccacgcgtacaaatatataaaattgtactatctatgaaagcaggactttttgtatgtctagaaaaagtaaatttagctatgaagctaagcttaaagcagttaaacaatacataagtggcgaagcatcacctgcttcaattgcgaaagttttaggggctggcaagactacactgcgccaatgggtatatgcatttaaagatcatgggccagaagcattaagaccacataaatataatcaaagatacagtaaagattttaaactcaaatgcatagctgcctatttaaatggcgaaggctcatatgattatctaacaaataagtttggtttgcgaagtgctgcacagttaaagcagtgggttatcaagtataatagtcatcaagaactcaaggactacaatcctattctggaggcttatatgactaagagaaaaaagacaaccctagaagaacgtaaacagatagtgaaatactgcaaggatcatcaatggaactacaaggaagcagctcttaaatttggctgcagctatgcccaagtatacaactggtcaaaaaaatacagcgcaaagggaactgacggcttagcagataggcgcggtcatcgtttaaaagaagctgagctatctgaaactcaaaggctaaagcgtgaaattgaacagcttaaaaaagaaaatgatattaaagaccaagagatagccttcctaaaaaaagtgaaggaattagaaaggatgtgtttgctggacagccaaaacaaagacaaatagcacttaaacaacagcagcgaaattctctttacagtttgatcaaagaatgtcaccgagaatataagtggtcaattgaatggatgtgcaaacaagccaatattgcccggtcagcctactacaaatggcttaatcataagccaagcaaacgtgaactaagagatcaaaagattcttaagcgtattaaagaaatagctgagagcaataacagcctctttggttctcctaagatgactttggctttaaacaatgagctagcagacggtgaggccaaaatataccgtagaactgtggctcgcttgatgtgcgtgaatggcatctatactagcaaggccagatttaataagaggtatcgctatcaagctgctagaccggaagaaactgccgaaaatctattgcatagagacttcaatgccactaaacccaatgaaaaatggtgcactgacattactgaagaaaaaattcctggaacaagtcaaaagatttatctctgtactatctttgatctatatgatcgtttccctgttggctatgctttaagcaagcgcaatgatacagccctagttaacgctgctctgtcaactgcttggaaaagagagcccaatagtcatgcaatgcttcatagtgatcgaggatttcaatttaccaggatgccttttaagcatgagctagaagaacatggcatgccacaatcaatgtctagaattggccgctgtattgataatggcccaatggaaggctggcaaggtttaattaaagaaatgcgagaagttctttatccgaaggcaaatagctatgaagagatggaaaaagcctttaaagcaagtattgaatactatattaattatgatcctcaggagcgcttcaatggcaagagcgcaggtcaggttagaaaagaagctaagaataatccagagaatataatttcatatccaataaaacaagataaaagatataaagacttttggaaaaagattgatgaaaagaaaaatcagctcgcacaatagcgaactgattaatcaaattaatttatatatttaagctgtctacttgacacggtacggatcatttcgagtagtcgtctttgtttgttgaaggtgaaatttcaacaaatctatcttagtcagaacttggagttatctattagtaccagccatttgcttgccagaaacttttagcagcgctccaagagccatatctagatttgacataattatccgctacacgttcttggttagcagctgaataatcaccattcaaataagatgaagaaagttgatacttacctacatattggccatttctagcactgtatgagccaccagattctttgcttgcaatccatgcctttgcactagcttcggaacctgtcgcggttgatgaatatgaactagttgttgtcgtcttaggtgtgtagttcacatttgaataagtgtatgaactttgactttggctagcttgtgtagtttgttgagctggcgtttgtgtttgagtgtaggtattttcttgtctagcttgagtattttggctagtagtataattagttgccaatacccattgatttaagccaagatcataccacttctgtccctttgaatcataagcagtttttataatcttccagttagtacctgcagctagagtttgaccagttgcaactggattttcatagttattgtaaacggtagtagcttgtgtagttgtatacactgctgcatcattttgcacaacggcagcttgtgcttcattattatctagttgattgattgcaccaatacctgcaagtgataaagcagcaacagcaatagtcttagttaaaatagatttagttttcaaaaaacatctctccttaaattaaaacgtcaattactattcatcatttttgttttattattctcttgcaattgacattttatataatacctgcttcgagttgcagttccatcacagtcagatcacacaatgattaaagaaaaatgttttttcgtaacagttggaaatatttttaataaatctagatttctctgcaatatttgtaaaaatcatgcaatatatgaacaaaatttgacgacaaaataagcatccctacgccataaaagatcgttttagggatgcttatttaattaataatctaattcttgatccatacttgcaggccagccaccaataccacgtttttgatcaaggccacgcaatgtctccatctcttcagcagtaaattcaaaatcaaaaatatccaaattatccttcatgtgtaacggattcgtcgagccaggaatagtcatgatattttcttgtaccaagaagtgtaacgcaatttgtggcactgtcttattatacttctcagccaaagaaagtaaggttgggtcattaaataaagccttcattccttcaccgagtggtgaccaagattcatgtacaatattattttcaattaaatatttatgcattttcttttgttgcttaaagacagacgtttcaatttgatcaactactggcttagtatcgaaattattcataatttcatttacttgatcatggttgaagttactcagtccaattgaacgtagctttcccacctgatatgcctcctcaagtgcctggtaagtacctaaactatcagacataggccagtgaataatcattaaatcaaaatagtcttgctgggcgtgaattaacgattcatcaatcccattcttcgtctctctataaccacttgtttgcgctttagtggtcaaaaaaatgtcttcacgtttaatgccgcttttgttaatagcattgcctacttctgcttcattactgtatgcttgagcagtatcaattaaccgatatccagccttcaaagcctcgacaaccgctccttcagtaattctaggctgaattctatatgttccaaagccgaagattggagtttttacaccgttattaaaagttaaatatttcatttttattcctcaatattttattcaggatcagatgcagagtgataagtaatactaaatccagcttgatattccttacctggctccaaatgattcataccatatttgtgctctagctcaccatcagcatcttctctatctgcaattccccaccatggctcaatgcatacataattagcggtatttggatattgtgaccaaatgccaacatatggtgcatttctagtccaaacattgatgtggaacttactcttatcagttctcaaagatactttattgtcatgaccatgtaattcataaatcaaggcatcatctttaaatagctcatcacttaaaccaataaaactatcagtcgaagctagagaacgattattccagtcaagatatgctcctttaagtgggatttttaccctagcaatagatggatgcatatcgaaataataatcttctttctcttccccattatttactggtaagttaaatccagggtgaccacctacaccaaaaatcatagtttcatctgatttattaactacgctaaagttttcttccaataaattattcatcaaattatagttaactctgaattcaaatttaaatggatacatttcacgcgttttttcattatctttcagtaagaacgtgatactttcttgtgtatgattctccacttcaaaatcacaatcacgggcaaaaccatgctgacccatatgataggtcttaccttgatacttatattcatcattcttaagtcgccctacaattggaaaaagtacaggtgcatgtctgccccagatctctggatcagcttgccacatatattcttcaccggtatgagctcctttaacgctctgaacttcagctccgtgatccgaaatcactacttcgatcatattattcttgattgtgtaatccataactaaatttccctctacatatcaaacagttaaaaatcataatgtaatcgcttaattacttatattttaacattaatgcgtcaataagccagaataaaaacaaaagaaaaaagccctgaattgtcaaattaagtgcaacagttaggttatgaagagatatattgcttgaagagttcctctgctgtgtgatattggaggattcggcgatatttgtggttaatggcatcagttgcctgttgaacataagcttttgacttgtctttcatgctcttgcccttagggaagaattgacgcaaaagaccattgcagttctcattggtgcccctttcccatggagaatatgggtgagcaaagtaaatctggcagcccttgatcttggtcatatccgcaaactcagagccattgtcaaacgtgattgatttaaaccaggcaggatgtctgtcaatctccttttgaagcagcctttggcatgtgcttgcccgatagtcaggaatcttgataactacttcaaagcgtgtggttctttcagtcaaagtcattaaagcaggctgattcttgcgtctgacgcctttaaccagatctccttcccagtgcagcggagcttttctgtcttcaacctccttaggacgctgttcaatggaattgccaagatgcttcttgtgcaaagcgtgaccgccatggctgtgatgacgcttgttcctgcgtcttttgagcttcataggcagatcaatattgcttatgtccagcaagccctgatcaatatagcgatagacggttggtgtgctgggacaagggtagcctggcatagtccttttgaattcaccaacgaactcatcgatgctggtggcatcaaatttagctttaaagcgtctggagagcattctcaaaaagacagcataatgcttcaatggattgcgctgatagcagtttttgcgacgcttctcataataaatctgtgcagtatcagcgtaatagtgctcatacaataaatagctgctgtctctttgcaggacacttccgcgtttgatttcgcgactgattgtcgacttatggcagccgacttcttgagcgataacagtacgggaagttatgccggaatccagcattgcttgaatttgtccacgttgtacgctggttaattgatgatagtgcttagaaatgctagaatttgaattggtcataaagatcttcctttcttgatttttcgtcacttcaagtttaggtcttcatggcctttttgtttaacacttagtgttgcacttcaattttaaatccgggaaaagaaaaaagcattcaaactttgaattgaatgcttcattcgtgattctttgatcaattagagaataaatttagttaagtctttattcataataatatcgcctaacttatcttcaacataggcttcagtaactgtgatttcacccatttccatatcaggcccttcgtaaagaacgtcttctaagagcttttcaagaatagttgaaagtcgacgagcaccaatattatcagtgccttggttaacatcaaaggcaatctccgcaattttatcaacggcttcttgggtgaaaactaacttaatgccatctgccttcattaaagcaatgtattgcttaagcaatgaattttgtggatccttcaagatcttgacaaaatcgtccttggttaaagcgttaagttcaacccgaattggaaaacgtccttgaagttctggaatcaaatcactaggcttactttcagcaaaggcacctgcagcaataaacaaaatatgatcagttgaaactgggccatattttgtatttacagttgagccttcaacgattggtaaaatatctctttgaacaccttcacgagaaacttcaccagaattacgtttattaccagcaataattttatcaatttcatcaataaagataattccgttattctggcttctttcaatagcatgttgatagatagcgtcatagtcaactaacttacgtgattcttcttgaatcaaaacttcacgtgcttcttttactgataaagtacgcttaacctttttcttaggcataagatcactaagcattgagcccatatccatccccatttgacccatcatgtcactcattgggttggccttaggagcttgttctacctctatggtaacttcgtgatcttcaagtaagcctttagctagcttttcagccacatccattcgtttgtttcttacatcagcagaaacatcctcttcatgatcttcttcgcgattattttctcccatcaacatagacatcatatcttgcatttgctgcatttgattttcacgacgttcatgtttctctgctggagctaacaaacgaactaattctttatttgcttctttagttgcttgagtctttacacgagcaaattggtccttttcttccattcgtacggcttcggaaaccaagtcacggaccattgattcaacgtcacgtcctacataacctacttcagtaaacttcgttgcctctactttaacaaagggagcttctacaatatcagctaaacgacgagcaatttcagttttacctacaccagtaggaccagccattaataaattcttaggcgttacttcacgttgcatttctttagataactgcattctacggtaacggttgtaaagagctatcgcaactgattttttagcttcatcttggccaataatatattcgtttaaaattttaactatttcttttggggtcttaatagccatttccttcactcctaaatttcatcagtgacaattttatcatcagtgaaaacatcaattcctgaagcaatctttacagcttcatgtgcaatttcatcggccttcatatcttttgcgtgtcgagtcatggcaatcgctgcggcttgagcaaaattaccacctgaaccaattgcaactacgttttcatcaggttcaagtacttcaccattacctgaaattaaaagtaggtctttgtcatcaaaagcaatcaacattgcatttaatttttgtagagttggatccttacgccatgcttgagccatttccacggcagcacgacgaagatcgcctgagtagctttcgagcttgccctcaagcatatcttgaaggctgactgcatcagctacaccaccggcaaaaccaattactacacgatcatggtaaatacgacgaatcttacgcgctgttgccttggcaataactttttcgcctaaggttacttgtccatcaccggcaattgctgtttttccattaaatcttactgaacaaattgttgtcatgttaaacctcaactttctttattacgaggaaaatatttttgataatctgattttaaatgagccattgttacatgagtatagatttgcgttgctgatagactactgtgtcctaataactcttggacacttcgcaaatctgctccattattaagcatcgcggtagcaaagctatgtcgcaactcatgtgggtgtactttaccactaattcctgcctgattaaaagttttttgcattacagtttcaattccgcggctagtaatgccagttccttgattatttaaaaatacatgctgttcatcatcatttttaagtaataatggacgtgcattttctaaataagcaatcaaagatttttttgttttatcatcaaaagcaacatagcggtctttatttcctttaccgtgaaccaaaattgtctgtaagtctaaatcaagttgattcaaagtaagattactaacctcacttacccgcatccctgtcgcataaaacagttcaaacattgccaaatttctcatcgtcaaaggcttatttcctttcaatgaatcaaaaacctgctttaattcaggctggtaaaaaaattgcggtaattttttctcaccacggcgtaaagtaatacccttagttggatcgattgccactagtttgcggcgggttaaaaagcggtaaaaagaatgcaggctggacatcttgcgcaactgactactacgggctaacttgcgttctgctaaatgttgtagataaacctggatatcacgttctcttactttagtccaacctgggaatccaccattttcatgccaaaacctttccgcttcatgcaaatctgtttgataagctaaaacggttttcgcactataatgacgctcattttgtaaatatgataaaaattgatctaactcactttgcctttggttcattaatctaaaacttccgtcttaaattcatctaaactagcaagaccacgttcactgaccttctcatggcgctcacgcttcttgcgaatcttcttaccctctagtggaggtagcaaagcaaaactagcattcattggttggaaatgtttagcactcgtagtagttatgtagttagccattgagcctaacgcagtatcttttgggaaagccacagtatctttccccatagcttcacgtgctgcattaattcctgctactaagccactacctgcactttctacatagccttcaacacctgtcatctggcctgcaaaaaataatccaggctgctcttttgcctcgtaagaagctgtcaaaacttctggtgaagccatataagtattacgatgcattttaccataacgaacgaaacgtgcattttctaagcctgggatcattgaaaatactcgtttttgttcaccaaatttcaaatgagtttggaaaccaacaatattatacattgaagctgcagcattatcttggcgcaactgtacaactgcataaggagttttgcctgtatgtggatcttctaatcctactggtttaagtggaccaaaaagcattgttttagccccacgcgctgccattacttcaattggcatacacccctcaaaaacatcgctattttcaaaaccatgtaattgcgcagtttcagcgttaattaattcctgactaaacttttcatattgctctttagtcataggacaattcaaatatgcagcttcaccacgatcataacgcgactttttataaacaattttcatatcaatcgagtcagcggccacaatcggagctgctgcatcaaagaaatgtaaactatcagttccagaaaatttttgaatctgtccagctaaagcatcactagttaacggaccagttgcaataattgtaatcccatctttcggaatttcagtaacttcttcttcgtgaacagttacattctctaacccacgcaaagtgtcagttacgtatttactgaaactatcacgatcaacggctaatgctccacctgcaggcacttgagttttgtcggcagctttcatgatcaatgaatctaaatgacgcatttcttcttttaaaagacctacagcattagataattgatttgatctcattgaattggtacaaaccagttccgcaaattcaccagtttcatgagctggagtctccttttttggtcgcatttcataaaggtcaacatgaataccacgcttagctaattgccaagttgcttcactaccagcaagacctgcaccaataactgttacattttttggcatttactcacctatattttctatgttaattgtttttttcgttttcactgtcttcacgataatcaccgttaggacaaagaatcactggaccttttttagaatgcttttctactaaaaagtggccatcatttggacaatttctgccaattggcttgtcccatgagacaaagtcgcattctggataacgagaacagccgtagaatttacgatttctacgtgatttcttttcgacaacctgacctttgccacattttggacaaactacaccgatttctttaatgattggcttagtattacgacaatctgggaaacgagaacaagcatagaacttgccatagcgtcccatcttaatcaccattggtgcaccacaaatatcacaattaaagccagctggttcatccttgatttgtaccttttcgatttcactatcagccttatttaattctttcttaaacggttgatagtattcgtcaacaacatgaacccaatcctttttaccatcttcgacttcatccaattcattttcaagtcgggcggtgtaatcaacatcagtaatatctgggaagaagctttcaattaagccatcaacaatttcacctaattcagttggtacaattgaacgaccatcaagtttaacataatagcggcgttgaattgtatctattgtaggtgcataagttgaaggacggcccacgccattttcttccaatgcgtgaactaatgatgcttcagtatagcgtgctggtggtaacgtaaagtgctgtttgttatcggacttagtcatcttgaccttgtcaccctcttcaagatcaggtaagtcaacattcttttcttgttgattatcataaaccttggtgaaaccagcaaatttcaatttagaaccagtagttctaaaaatcacaccattttgaacaatatctgcacgaacagtatcataaacagctggggtcatttcactggccaaaaaacgtgaccaaatcaatttgtataaacgatattgttccgtagttaggacactctttaatgactccggtgtgcgatatacagatgttgggcgaatggcctcgtgagcatcttgtgcgtcttcttgattcttaaaatggcgttgactcttagctgcaaattctgcaccataattttcatgcaaaaacttagaagcctcttgttgggcaactggtgatgttctcttagagtcagttctcatataagtaatcaaaccaactgttccttgcttacctaaagaaatcccttcatataattgctgagcaatactcatagttctacgagtacgataacctaaacgcttattggcttcttgctgcattgtagaagttgtaaatggggctgctggctgacgccgacgttgccgagcaacaactttatctactacaaagtcctttttcttatcgattttagccaaaacatccttaacagaatcgatattaggcaattctttctttttgccatcaacaccataaaaggcagatttaaaagtttctttacccttagcaaattccgcatcaattgaccaatattcttttggcttaaagttcttgatctccttttcacgatcaatcactaattttaaggcaactgattgtacacgtcctgcagataaaccttttttaactttggcccaaagaattggtgaaagtgaataccctacaattcgatcaagtacacgtcttgcctgttgggcatcaaccgtatccatatcaattgtccggggatgcttgaagctttctttaactgcatccttggtaacttcgttaaaagttactctattcttggctttttcgtcaagattcaatgcgtgcgctacgtgccaagcaattgcttcgccttcacgatcggggtcggatgctaaataaacatccttagccttcttggcttcgctttttaattctttaatggtatcgcctttaccacgaatggaaatatacttaggcttatagtcgtcttcaaagtcgattcccatttgtgacttaggcaaatcacgaatatgccccttggaagcaataacgtgatagtttcttcctaaatatttttcaatagtcttagcttttgcaggtgattccacaatgactaaggtctttttacgtttttttgttgttttacttttcgctttagtaggcattaactgcctccttaattcttattttattttatgggtacagtccaaaaataactaatactttctgaattgtcaaatctttatcttgttaaatttaaaatcaacaattggcgtagctcctgcttcaattaattgattgggacctgcagacaatgcattagtaattggtccaggtactgcataaatatcgcgattttcttgtaacgctaaattagcagtaatcagtgaacccgacttttctttagcctcagtaacgattatactttgacttaagccggccaagatacggttgcgttcaggaaaacgatacggacgcggtggtgtatcaggcaaatattcactaatcaatagtcccttttgcacaatctcttcttgtaaagcaaaattttgcattggatatgaaaaatttaaaccattgccaataaccgcaattgtttttccttggttgaaaagtgcagccttatgagctaaggcatcaacgccttttgctaagccacttgctacaacctgaccagattgcacaatattaggtaccaagcgattaataacatcttgactatacttagtcggatagcgtgagccaacaattgtaatgatttctttttgcagtaaagaaatatctcctcgggtaaacaataccataggtggtcgataaatttgacgtagtttttctggatatgcttcatcgaaaaaactgattacgtcacactgctgttcaatttgttgtaccattcgatccaactgatcatcctgaaaagcgcgatagcatgcatccattagttcctcagttaattcaatttgttctaattcttcaaattcaatttctgtttcatcagttacctgattagcaattgtcagcaatttaacataaccaatccctttttgcaattttaattttagtagaaattctgtttttttcataaaaaaagccctccactatttattacgcaaaaagagaccattatttttttataaattgaaatttattcaaaaaaatcactgactggagcaaatgttttgcggtgaattggcgtagggccatactttttcaaggcttcaatgtgctccttggtgccgtatcctgcattatgatgaaagcaatattgagggtatattctatcataatcatccatcaattgatctcgaaagaccttggccacaattgaagctgccgcaattgaattcgacttagcatctcccttaatcaatttaacttggggtagatttactggcacattcattgcatctaccaaaagtgcattcggcttaacatcaagtgctcgtactgcttgagccatcgcttgacggtcagcttcataaatattaatttgatcgattacctctgcactttttactccaataccaacactaactgcttccgctaaaattttaggatataacttcaatcgtttctctgggctcaatttcttcgagtcgtttacatctaataaatcaaaatcttgatcaattatcacagcagcagttactaccggtccagctaaagggccacgtcctacctcatcaacacccgctactaattgtcccttttcccagaactttttttcataagaaaagcgacgcaaaaactcttctttttttgctagtaattttgcttgacgcttacgataactaactaacaatttttgtacgccggcccgcggatctgcctcaagttcgttaatttgggcttcagagacctcagatttcaacagctcttttatttctttaattgtcatggtctatctaacgtaatccttccgattgcacccttacgcaatttttgtaacataaataatgaaaaacgatcataatcatcacgcatgccatatttttcagtcattgacaaaagcaaatctggatcagccatatcagcaatttgctgttcaggtaatttagaaaatttaagcaaatccttagcataaaattcacgtaaatttttcaaaacaaataatgctacatcatctgcatgaaaaacactatccttaattgcaccgaaagcagctaatttataaccaacttcctgatcagaaaatttaggccataaaatccctggtgtatcgagcacttgaatattagcatttgttttcagccatctttgtcccttagttacacctggtttgttaccgacttcagccacgttccgaccaactaaacgattaatcaccgttgacttgccacagttaggaatacctgccaaagcaattctaatagtaggatttgaggcccctcgtgcttctagcttctctgttttggcagctgccgccttttttactaaggaaaccaacttctgcatattagtattgtgcaaggagtcaagtgccaaaacatacttattatctccagctaattctgctgcccatgcctttgttaaaactggatcagctaaatcagccttatttaagataataatatgtggtttattaccaactagtccttcaatcattggatttcttgaagcttgcggaattcgggcatcaagtacttccaccaaaacatcaatcagtcctaacttatcttccagttgattacgagccttgttcatatgccccggataccattgaattgttgccatattatctcttctttctaaaattaatcattttcatcatctaagaacaccacttctgacatcaaaatctgtctatataaagccagaaagcctcgacgatattttctctcttgttgtgcaattttacctaaatagtcacgttcttgtctaaaagcatatctatatacctcagctctaaattctttctgatcatcgggtaattctttttgtttaattgtatactttatttccctagcaaaatcaaccatagaagtttgattcatttgtgcccttaaatcgaattttaattgttttcgaatctttttaggtaaatagatctttttcatttgatccatagcatactcaatcattgccacacgaactcgatcaacttcctttctttgatcaaaatcaggtatatctttgtccaagatcatgtgaaaaacaattgttggaacaatcatacttagtaaaataagcgtaatttcactcaccaaaattaaatggaaatctgctacattaatacgtaaatcatataacgtatatgctaaagcaaaagtaactgctccatgaatgccacccagactaaaaatcaatgcttctttattactcgtttttcctttaatagaagggctaaatcgataataaaagtatctaataagcaaattagctaggtataaaattattccgatcaaaatcgcatcaattgtttgttgattaaaatgtcttccctcattgaccgaacaatgatgattcccaaaagcaaaaagacaatcccatttaaaatatcaatcagaagttgcgataattgattactgttataaaaaataaaggcattagtaagcctgcttcgctcagattcaacgttatgaatcaatccggctgcaacgactgcaataattccagaaacgtgaatttcttctgctaaaaaatatattattaacggtgtcaaaaagaatatgacatcaaccggcattgcaacaccagcagataaatgatatttggagcgaaaactttcctgacgcaagaaaactaataaagtagccaccaaagctcctagaaaaaacctccacctgcagaatataaaaaattacctattgcttgtccaatccgtaattcttgatgcaagtaccaatcaactgccatattaagcaaaatgatacctgaagcgtcattaaacaaagactcatcttttaggtaaaaagcaatcttcttaggcagcttcaatccatgtgttacagattctgttgctgtagcatctgttggcgttgaaattgcagccagaataaaagccagtggtagagagacccatactaaaatagatcccgaatcccgcagttatagttgccaagataatcataataaccgttaacccaactattgcgccccacgaacgtaaaacattatacaacctagtacgttgtccctcaaaaaatagtaatggcgctacaatcaagcccataaataattccgagctaaagtcctcaattaatgaattagtttgtggtactagtgcaatagccgctccaatcgccattgcaatgtaattaactgatattctcttcaaaaagcgttgttgaataatcgtcgcaaatgctaccgcaaagacaataaaaccaataaaaattactacctgcatttttctacccacttaataaaaaagcccaggcatctatcaggcttgggcttaatacatcattttgtcttcatacattcgataagcacgatcaaaaattgacatacttggtaaataactagcattcaattccaaataatctgacaatttctcataatcttgttcttgcttaggaaaagtcaggtcatgctgtgcattattcgcaaattgagctacgtcatcagctgaatctgcatccctttgcgtcattaaatatcgataaaaactttctcggtaagccataattactccacataatataagatcgcataagcaccattgccagcatgtgttgcgataattggacttgtctctgccactaaaacattaatcgcaggattgattgcacgaattttttcagctaattcttccattaattcaggtgtatcaacgtacgaaatgcctacttctttaatatgctctttattatctgcgatttcttttaacactcgttcatcaaaagcacgtgtaaatttcttacctcgtccttttttggctacgattaacttaccttgtggcatctgaagagcgattctaatattaagcatagtagcaattcgaccagaaagtgcacctaaacggccacccttgattaagttttgtaaattaactaccatcatttccagtttttgagtactacgaatctttttaacatgatcaataatctcagccatgcttttaccagcctgagcatccttagcagcagccaaaacttggaagccttctgccctgtcggttagttcagagtcaataattgtaacattatcgctttgacctgcaatttctgcagcttgacgagcggcatctatcgtaccacttaatgatttagctaagaaaataccaatcacttgactgccatctgcggttaattttttaatcacatcaacaaaacggccaattggtggctgactagtcttaggtaagctctccgcttcattcatcttcttgacaaaatcacttctagtgatatcaatcccatccacatatgacttaccgtcgatggtaatcgtcaatgggactactgtaatgtcatatttttcaacttcttctggtgttaattggacggaagagtccgtcataacttttatcttcgacaacgtattcgccttcaattctaatttgtttacccgatttatgataaaatgtaagcaacatatatactgtattgtatcaaaaaactattagaagaaaaaaggattgattacacttcatgaaaattagcaaactttggcagcaaccagaacaacgatcagaaaggtactaccttctagataatatttttagtgccataactcatgggattggtttcggactagcagttaccggcttagtaattttaattgtaaaggcagctcatacaggcagcccgatgcgagttgttactttcacaatttatggctcttgcctggtactgctttatttattttccacactatatcacagtttagtttttacacgggccaaaaatatttttcaaatttttgaccattcctcaatctttcttttgattgcaggatcttatactccatattcacttgttgcaattggtggagcctggggttggactttatttggcttgatctggggcctaaccatctttggcatcatttactacatcttcaatcgtggtaaacacgtcatacttgatacaatcctctatgttgcaatgggatggttagttatcttgtcaggatcttatttatatgttcgcttaagtccaactggattctggctattagttagtggtggcattgcttacacaatcggcgcgattctgttcagtatgcgcaatgttccctttatccatactatctggcatttatttgttatgctcggttcaatcttaatgtacttttccgttttactttatgtttaaaaaatgtagcagttgaattctgctacatttttctttctattcaattgtagtcaaatagctttcaatcgcttcttgattattctcaacttcacctgaaacaactaactctcgaattttattcaaagtctgccccaattttgcacctggtcgcatcccgcgatctattaaaaatctcccatcaacggctagttccgacgcttttttaataggtaaagccatataacgatcaactaaagcttctgaagaaattggttgaccaacaatatgagcaacgtcaatcgtattaattaatgtctcttcccctgctaagaataattcataatcactaggagcatgactagaaagtaaatcaaatagattaataattctttcgacttgctcagtcatagcattagagtttttccagtcacgcataaaacgatgaatttgttcattcggtaatttcaatagcaaaattatcagtgaccacaaactattttccatcgttggactgaattttaactgtgggaaaatagctagttgatctttttttccgccaaaatcaggtacatcttcactcaaatttgtatcaagaaaaacctgaaaagcttgccgagcatgtggtcctaaacctaattttacaaattcttctcgaattcgttcaactgaaatttttttaagtaatttatgattatccttaattgcctgttgggtcttgctttctaacttaaattcaagttgactcataaaacgtacggcccgcatcattcgcaaagcatcctcgtgaaatcttttttctggatcacctacagcacgaatgacatggtttttgagatcatctagtccgttaaataagtcaacaatttgccctcgtgtatccattgccagagcgttaatcgtaaagtctctacgctttaaatcttcatctaagttttgaacaaatgttacacgatctggacgacgaaaatcttgataacccgattctgttctaaaagtggtaatctcataactttcaccaccataaaggacagtcaccgttccatgtttaattcctgtatcaattgacttatcaaataactcttttacctcttctggataagcactagtagtaatgtctacatcatgaacatgacgatgtaacaaaacatcgcggacagaaccacccacaaagtacgcttcaaagcctgcattttctaatatctgtaacacgggcattgccttggtaaaaatttctggtaaattatctatctttatcatattaaaatctcaattcttattgtctttattattacttttgctatacactttgttaaaattgaggaaagacataaaggaggtaatcattatgcgtaagattgacaaaagtatcttaattgatatcctcatgatcgcgctaggctgtgctatttccgctttaagtctagacatgatttctgtccccaataaactagccgacggcggactaagtggtatttcacttcttctgcggcatttttggggcatcaacatgggactatcgacccttgtattgaatattccactaattttgttaggctatcgctttatgggcaaacgtcttttagcctatacaatctggggaacgctcagtctttcctttttcttatggttttggcattcagtacctattataaaacaattagatttagaacacgacctcttcctttcagcaatttctgctgggttattgtctggaatcggattagggttagtatttagatataatggtacttccggtggaactgatattattgcccgaatctgtcagataaaatttggtatttcgtctggcaaaatgcttttagcttgtgatgcaatagtactcttcgcatccctatcttacctagacatcaagcatatgctatacacattattagcttcttttgtcttatcccgagtaatggataccgttcagcaaggtgcatacacagcccgtggtttattaattatctctgacaaatatgaacaaattggcaagatgattgatttaaaactaaatcgtggtttcacatatctaaaagctttaggtggctatcaacaaaatgaaaaacgtgtaatttatgttgtagtcgcaccgcgggaaattccatcaatcaaagctttaatcaagcaagaagatccacatgcttttgtttcaataattgaggtaaatgaggcaatgggagaaggatttacttataaaaaaccacatcgctttttcatccacaagtaaaaagctataccatgatgcatttcatgatatagcttttcttttactaataattaataattacagtcaatacgttattagctttaacgtattcgttttctccaatttgaatgaatggccgttcatcaatttctttatggccaagatttttaactttagagccttgtttaacaaacttacctggaattggctgaccatttttatcataaacatatgatggatgcttaatgcggttaattgtctcggctgtgtccttaatgtatggtaaaaatgccccttccttaacgaatttattcttaccaatcttcacaaaattattgccattaattgatttaatgcctaggatcttgtaaacacggcccttttttaaatgtccaactttttctcctttacggttaaaaatcgttgcttttctagtcaagtttaactttttaccctgacgaattggattagttgtagctgcgttaactgtctgagcagtcatcgcacctaaacttaaggaggctaagactactcctgccatatacataatttttttgttcatcatgatctcatcccctaatcattacttaatcttcttacctatattttaacaaaaaatgcagaggttatacacttttctctatttttatttatgggatggataacacttattctttgcaatctttcatggcaagaactaatcttagcttgtaagcgtttgtcaatatcaagcaatcaagaggatgaaaacaatgccaaaaaacagttactcccaagaagctttcgttcatgtctatttacttcttgggaattaatggggtaattgggtccggtgcctttttaatacctcaaacaatctataaagatatgaacttgatgagtgttttcataacaatttgtgctgctcttacagtaagtatggttactctttgttatgctgacttgtcaagtcgttttactggatcaggcgcagcttggctttattcatatcacgcctttgggcgatttactggctacgaacttggaatatatacttggtttttaggatgctgtacatatgcggcagaaatagtagctttgttaactattttaaagactttgtcccctgtttttagtaatcacgctgttcactacgggatagctattggaataattgtgctaattgtgctgtttacgattattaacttatttggtcggacaattgtaaaattagtcgataacttatcctctgctgccaaaatgattactattctgatttttatcatcattggtgccttttttattcataaaatgaactttacacctgtgattcctaaagcagcaaccctaggtgttggtccttacttcaaacattttggtgctgcatttagtgtagtattttacatgtttactggattctcctttattccgattgccccaaaacagatgaataatccagagaaaaatattcccaaagtattgatctcagtgatgatcactgtgactattttatatgcattaatgatgttagtagctatcgggattttaggatccaagatggttaattacagtacgcctattgctgtagcctttcaaaaggccgttggtgattggggctacgttctagtgattgcagggatgctgattagtgttatcggcgttgcttttgcaggatctttcaatactccatcgttgattgcttctcttgactccatcgttgattgcttctcttgctaatgagcacgcaatgttacctaaatggattggaaaaaagaacaagcatgatgctgcttgggtagctattttactcagtgcaatcatcactatgattttaatcacacaatcatacctcttcttggtatcttgcattgtattggcttcatttattcaatatgtaccatctatcttagcagtaatcaaattcaagcatactaatgaatttccaaataacggttttaagctcccattcggctatgttattccagctttggcattaattatttcatgctacatggtaaccaatttcacttggaaaactattttggtcggaatagtcgtaggggtattagccgcagtagcttacttcttcattgaaaaagatgaagaaaagcatcaaaagtatttgtcaaaaatgcgtaataaataattttcaagttataaggacgatgactagaaactgtcaaatcttttgtgtaaatagttctttctcgtaaattgattttttaattatttatttaatcaaagtaggattctaaggtgtcctgaacctgaccaaagcctttatgaattcgattgaaataacggtcattgtagctcattgcctgaataccaataaaagcatcaagcgactgttcagttggaaactctgccttaggcttagctttgcgcttgatcacattgttaaatgattcaatcatgttagtcgaataaattgaagctctgatctgcttgggatagttataaaagaccagcagatctggttctatgtctttcaagcttctgataacatggctgtaaaccttgccccatttggtatagaagtcatgcaggacagctgtggcttcttctttgtttgtctgttgatgcacctgtttgaattcgttcatgatcttttcacgatcgtcgacgcgtactttagcgcagatattgcgcatgacatgaaccaaacagcgttgaaaatgagctttaggataagtcctggccaaggctgttttcatgccaacaacaccatcagaaagaaaaagctcaacttgctttaagcctcgggatttcatgttttgaagcatatctgtccagacttcaatgttctcgctaggtgcaatgcagtagtcaatgacctccttgtgcccattaggcttgatgccaatggcaatatagactgcttcacgctcaaatgtttctcggcgcaaaggaaggtatgtcgcatccaaatagacgcagaaaaacttgtcgcttagcttgcgtttgtggtaagcctcaacctttggaatcatctgcttggaaatatttgatacctgagctggactgtaatggctgccatacatcttttcaattagatcggctatttccctggtggtcacgcccttggagtaaagcttgataatcatgctttccaagatatccgagtgctgcttgtagccaggcagcgtgtgctgatgaaactgaccgttgcgatcccgaggcacttgcacttcaattgggccaaattgcgtatcaactttgcggaaataagcaccatttctagagttgccagtattccagccatttctggcatagggatcatagcccagaaaggcagtcaattcagcttctaacaagttattaacagcctgttgtagctctttgcgcaataaatcatttattttgtctggattgaatagagcttgagcaaaatctttggtaaaatcattcatgaaggagttcttctttctgtatgtgtttttttgttcaaaccaatcatacgagaaaggaactcctttttctaatgtttaaagaaataaatttaaggaatcattcatccttacacaaactattttacagtctcgatgactatccaatatcgcccttattttttgatcaattaagactttttagtctgcttttaaatctatttttcaacttatacattatgaaagcccatctcctcttaataatatttagtgctaaactgttagatagattagtattagaaaagagcaacaacaaatgagtaatcagaaagctaaaataaataataccgaaattaaaactagagtatctcacttcagaccaagccagtaaaaaaattcaagttaacataaaaggaaaaccatatgtctgaagagataattaacacagtcacaacaaaaaatgattttaagagtgcattaagaaatgcgggtattaaagatgatgataccgtattagttcatactgcactaagtaaattctattacgttcctaatggtccagaaaccattgtcgaagccttaaaagaagctgtgcctaatggaacaataatgatgccctcacaagtttctacgaattgtgatccagccacttgggaatatccaccagtacaaaaatctttgattcaagtagttaaggatgctatgccaccttataatcctacaacatcaatgacagaaggcttaggggttacgccagagtatttcagaactttgccagatgttgttcgaagtacccatccttacttgccaattgctatttggggcaaaaacaaagtaaagattgcacagaatcaacctttaaatattccttatggaattgacagtcctttagattatttgtaccagaataatggcaaaactatctttttaggcactgattatgaaacgtgtacagttttgcactatgcagaatccacaattggtagaaaaaccgaaacatgttctgctgcaactagtctggatgaaagcggcaaaactatttggactgaatatcaaaatattgatatggattcatatgatgactttaatgaattagggacagagtttgaagcaaagcatccctctgctatcaaaaaggttaagttaaacaatggtgtcatcaaagcaataaatgtaaaaccgctaattgattttgctagaaaatggtttataaaaaaagacaataatcattcaatttaataataaaaggaagaagtcactttcaacttcttcctttttctttatttaatctttgttaaaacctttgcacctatatttaaacctacactatgcgatttaccgccccaatcacgttcatcataattatccatatcagctaaagtatctgcagtgaaaagaaattgtgcaaaatcaatctttctaaactgagcacatgctgctaaagctgcacattccatttctacagttgacgcgcctaactgacgaaattgtgccacttttttaggcgtttctctaaagaaaccatctgttgtccaagtcgttatctcgtcatattctatatttagctcaactaaaatcttttctacttccttcaaaaatatagaatctagttccacaagttgtccaggattcatatagtgaaaagatgtcccttcatctcgaattgcacgtgttggaagtagcatcgcattttcaggtaaatctactaaggcacctgctgttccaatggttaacaccttttctactccataagcaattagccattcaagcaactgtacagctgccggtgctcccaagggcgcttgacacaaagtgaaaaattcgttattaatttgaacttcataaattttaggattaaaagaacatgactcaaattcacctaaagtacggtgaaaatggtgatctaaaaatgcattaatttctttttccggcacgaatgcgtaaagcaatcttggatgaaaatgaaatggttcttgatcgtgatttggttcaagaaccgcatgaggatgtttgtcaaagtctaaaatgaatggttgtttgttcatattttacactccatttttagttgaaatattatcataaactcgctaatacctgagatccaatattcaagctaacgctatatgaatcatggccccagttacgtttatcatagttatccatatcagctaaactatcggcagtaaacaaaatttgtgcaaaacttatatttctaaattctgcacaagcagctaaagctgagcactccatttctacagtttttgcacctagttttttagcttgcaaaacttgattaggtgtttctctaaaaaatccatctgttgtccaagttgttccctcttcatattggaaacctaaattttttatttcattctcaactcttcttacaaaatttttatctaatgcaataatcttacttggttctttgtagtaaaaagatgtcccctctccgcgaatcgcttcttgagggacaaacatcgtgttttcaggtagattatccaaagctcctgcgtttccaacagataaaacttgtttaactccataattgatcaaccagtctaaaaactttgttgaagctggtgctcccactggagcttgacataacgtaattagttgattattgacttccacttcatatattttaggtctaaacgaaacagttttaaatttgcccagagtcttatgagagtgtttatctaaaaacgagttaatttcatcatctgggacaaatgcaaaaagcaatttttcatgaaacttatactctaaattttcgactccaggttctattacagcttttttacttaaatcaatatctaaaacaaatgatccttcattcatatacgcgtggtgctagttaaatcgttctagacaataagccaaattataagctaaaattgcaatttccaaccggctttgaaagcctatcagactacgtgctcgattgttctcggcattgtaataggtcagaagcgaaaagtcgctttcaattgttctgcgaatagccatcaattgatgatcattgtgctttttagctcctgtcatatttttacgatatggtgtccaaagttcgtaacccatttgttttagctgttgatgcagttctttgcctaaatagccttcgtcgccaagaagatagtaattagatggatgggtattttctatcagttcaactgtctccctggcatcatgaactgatgcctttgttacgacataatcaagaatgtaaccgtcatcgctaacaatggcatgaactttgaaaccatagaagtaaattttcttggtggccttataaccaatgttggcataaccgcgaaaaattttagcacgatagtttcgaattggttggcaaacaggtaccggaaagctgtcaatgatcaagaactgtccattcaggtcaacctttttattcatttcttgccgtatctgataaatcaattgcaatagctgacgtgaacgccgattaaaacgtgagtgtgataaacaattgaaacattcacagaatcttctttgtgattcaattcctgtcttagcttgccagataagtaaagccaaaatcagactgtccgtagttttaatttgatcaatatttcgccgatgagtaaactcagccggtgcatacaaacgataccagtgccgacaaattatcactaaatctttaaaactaacttgtaaatggtggctaaaacgcttaagcttaaggcagttcaatcagatcagactcttttctattattactatttacaagtcgagtctaacaagattggacttttttattaactaaaacgatttaactagcaccacgcgtattcatatatattctcccttaatcaataaatggatagtcttcattaaagtaatgatcaataaaaatttgatgttgcttgttaaaaatcttggataatttatctttagaaaaatacttcagatcaagagtttcagagctaatctcttttgacattttttctactaattcaacagttactgcctgtgccacatcttgattaggataatgctggataaaattagttgaaacgcctaatagtgacttagttcttacttttaagccagtttcttctaaaaattctcgaacgcatgcttttggagctgattctccaaattctaaagcaccaccaggtaagccccatgcattaaaatctgatcttttttgaagtaagatttcattcttgctattagccaaaattccaccagcaaaatttagaataattggttcatgaccaactttttggcgtaaggtcttaatatagtttttaaccatcgctagtcctctacttgaatatcattcatcacaatttcaacttcatcgtctaaattaatctgactagtaaaagcatactcgggaataaaaccaagataatctttttcattccaccatgagcgcattgtttcttcaccaaaagaatgttcatgacgagttttatggcgtttcattgtttcttcaaacggaatatcaaaataataggcataaatttgatcaccaaaaagctgctgagattttttgaataaatcagcataccatttcgcattcaagataccttctaaaatagtgtaagaacagtgatgataaccatactcaagcaagttttctaataatggcaaagcaaatgtcttttctccgtctttaacattcagcatttctcttctaactgtatcttgtggaatcaatagtgtattgtgtggcaatcgacgatggatttctttagacagtgtagttttgccactgccagagtttcctcgaattataattaattttgatgtcatcatagaaatcttcactttcttaaaattaattcactgcatctctaattgttgcaaacttatcaaatgtataatctattataatctataccatgaattttaacaataggcagcattttccctttttgtcccatcaataatcctgcagaagcggctagcatgtcacagatagtttcaacattagttttatcttgatactgactttttcttaaaccagaaacaccatacaatccaattgctacttgagttgcaccttttttatcaattcttccatcactatcggtaattatgatagctactctgacttttaattgatcaaaaatatcatcactaattctcttagcaatttcatcacaatttttaggtaaaactattgcagtaccagcatcaattttatctacacctgcactagttaaaaacaaaccattcggcaaccacccaccaataaagttcttagatatctttagtttcttaccactcttatcttcggtttgatcaattataatctgaattagtcttggagcttttctaggtatttgctgatgcaaacgtaaggctaattgacttggattaatagaatttaagtgaacaaacagaccttcagatttagaaatcaatttagaagcaatacataaaacatcattatcgcgtatattaaatccttcatttttgattgtcctaattatttctgcacttaagttgcactttctctctattttcggaaaattatgcagcgcttcaattgtaatcatgactataacctcaaatcagatgttaatttgcccaaaacagtaatttcgtttctatcgcaatacttcaatgtttttatgatcggttaccatgatttatctggtatctttctcctttattaatggtattgttagcaaaacaacaccaaaatacactgcggatacaaaaaaacattacttttaagtctccaaatactttcataatactattgcttataaataatgaaatactaaccaagatctctgcaataaatgaaacagttgaaagcatagtcgacttattgctttctccataaatggcttcattactagtagctgaaatttgtcccgacatcattcccatcaatagttcaattaatagaaaaaggcaaagcagtaaatatttattttttagagtaccacttaatataaatgctccaatcatacttccagtattcaacaaagtaatcccttttgaattaaaggaagtagaaattttactaaataaaatcgaagagactgtaaaatattttgtgtaaggatgaataattccttaaatttatttctttaaacattagaaaaaggagttcctttctcgtatgattggtttgaacaaaaaaacacatacagaaagaagaactccttcatgaatgattttacaaaaaatatagcacaagctctattcaatcaagacaaaataaacgatttattgcgcaaagagctacaacaggctgttaataacttgctagaagctgaattgactgcctttctgggctatgatccctatgccagaaatggctggaatactggcaattctagaaatggtgcttatttccgcaaggttgatacccagtttggaccaattgaagtgcaagtgcctcgagatcgcaacggccagtttcatcagcacacgctgcctgactacaagcagcactctgatgttttggaaagcacgattatcaagctctactccaaaggcgtaactaccagagaaatcgctgacttgattgagaaaatgtatggcagtcattatagtccagcccaagtatcaaatatttccaagcagatgctccccaaggttgaggcttatcacaagcgcaagctaagcgacaagtttttctgtgtctatttggatgcgacataccttcctttgcgccgagaaacgtttgagcgtgaagcagtctatattgccattggcattaaacctaatggacataaagaagtcattgactactgcattgcgcctagtgagaacattgaagtctggacagagatgcttcaaaacatgaagtccagaggcttgaagcaagttgagctctttctttctgatggtgttgttggcatgaaagcggccttgaccaggacttatcctaaagctcattttcaacgctgcttggttcatgtcatgcgcaatatctgtgctaaagtccgggtggatgaccgcgaaaagatcatgaacgaattcaagcagatacatcaacagacaagccaaaaagaagctgcagctgtcttgcatgaattttatgcaaaatggaataaagcttatagccatgttatcaaaggtttgagggaaattgagcccgatctgctggtcttctacaattatcccaaacaaatcagagcttcaatttattcaaccaacatgattgaatcctttaacaacgtcatcaagcgtaaagctaagcctaaggcagaatttccaactgaacagtcgcttgatgtatttattggcatccaggcaatgagctacaatgaccgctatttcaaccgaattcataaaggctttggtcaggttcaggataccttagaatcctattttgattaaataaatgattaaaaaatcaatttacgagaaagaactatttacacaaaagatttgacagtttcctgcaatttgttttggatattcaaaatgtatatagtgagattcgcctaatgttataactttagatttaggattatttgaagtgtattctgaccgcttatattcattttcacgatacttttctgtaataacaatacttggtgttttatcacttatcctggtagtatttttccaaaacgaatcattttcgtaggctgcttgtgcgtttaaattatccttttcatcaaatttcttcgcattttgctctgtagttgtccaaaactttttattttcttctggagtaaaaatttctctaagatcagcttcaattttttcttgaagttttgccatgtttttatttttctcaatataagctggttcctttggaggatttaacatgatttctctagtagttggctcaattcctacaaaagccttcaaattattgattttatctttcatttgcatagcatacacaccgccaatgctatgagccaaaattataactttttttgcattaaaatcgttaataattttagctaatttagtagcttcgtctgatactgtatagtcctttaaagacttgccactaaagccactattcaaataatctgatgcaaaatagccatacttattgggcaaagcttcaattacttttgaaaaagattgtgctgtatcaaaactaccaaagccattcaaaaaaacaactaatggatctccctttcgataggcaaaattaatcttgcctaattcagtttcaatatcgcttctttgcataaatttctccctttattaaaactttgaagtcgttatattttaattatttcttagcacaaataccttatgcccattttcatcatcttttaaatacacgaaactacttcgcttagctacattctgactagcggaattcttaggatgagttcttaaaatcaaataatcaagcttcaactgttcaaatgcgtatttcttaagaaattcgacagattcagtcataattcctaaatgttgaaaatcattagaaagccaatatcctacttcgccagattcatgattcaaattatgtaagtcaatcatgccagctggctgtccatcaactaaaataactaggttgaatgctgtaccatcaaccattttttgttgaaacattttaattgaatcggcttctttttgaacagaatcaattttgttggcccaaactaaccatttagaaaactcagtaagatttttttgaagttgatcaaataagtcttttgcttgccaagtctctggaagaactaattcgatttctttatttttagttagaaatttatgtaaaacaaaagcagtatgacacatttcggaaactgtcaaatcttttgtgtaaatagatctttctcgtaaattgattttttaattatttatttaatcaaagtaggattctaaggtgtcctgaacctgaccaaagcctttatgaattcgattgaaataacggtcattgtagctcattgcctgaatgccaataaaagcatcaagcgactgttcagttggaaactctgccttaggcttagctttgcgcttgatcacattgttaaatgattcaatcatgttagtcgaataaattgaagctctgatctgcttgggatagttataaaagaccagcagatctggttctatgtctttcaagcttctgataacatggctgtaaaccttgccccatttggtatagaagtcatgcaggacagctgtggcttcttctttgtttgtctgttgatgcacctgtttgaattcgttcatgatcttttcacgatcgtcgacgcgtactttagcgcagatattgcgcatgacatgaaccaaacagcgttgaaaatgagctttaggataagtcctggccaaggctgttttcatgccaacaacaccatcagaaagaaaaagctcaacttgctttaagcctcgggatttcatgttttgaagcatatctgtccagacttcaatgttctcgctaggtgcaatgcagtagtcaatgacctccttgtgcccattaggcttgatgccaatggcaatatagactgcttcacgctcaaatgtttctcggcgcaaaggaaggtatgtcgcatccaaatagacgcagaaaaacttgtcgcttagcttgcgtttgtggtaagcctcaacctttggaatcatctgcttggaaatatttgatacctgagctggactgtaatggctgccatacatcttttcaattagatcggctatttccctggtggtcacgcccttggagtaaagcttgataatcatgctttccaagatatccgagtgctgcttgtagccaggcagcgtgtgctgatgaaactgaccgttgcgatcccgaggcacttgcacttcaattgggccaaattgcgtatcaactttgcggaaataagcaccatttctagagttgccagtattccagccatttctggcatagggatcatagcccagaaaggcagtcaattcagcttctaacaagttattaacagcctgttgtagctctttgcgcaataaatcatttattttgtctggattgaatagagcttgagcaaaatctttggtaaaatcattcatgaaggagttcttctttctgtatgtgtttttttgttcaaaccaatcatacgagaaaggaacccctttttctaatgtttaaagaaataaatttaaggaatcattcatccttacacaaactattttacagtctcgcctgcggcatcatatcttgaatctgcttcttggcccgctttaatatttttcccggccatttttaccaaattgcccacctgcatatggctaatattaaagccagacaggcaattgactgctagagcagtattgcgataagtggcaacgctgcttacttctaagatgtttttgactgctaaaatactgtagcgcttgtatttgtcaaagcccattaattcatccaagggataccttgcttgtttgcctgggcagacatatcttcttctgacatacctaacttcgccaaaagccatattgattgagcgctcattcttcttatcaatctgatagccctgtgctttaaccttggtaatcatttcatcatcaactttagctaaagccaaggccatgatttccttaatcaggtttaagaagaaacagattatttttctttcacgcttaatataattatcttcagactttataatatttgcgatttcagttacaattgaattcataaaagaccagcttctaatgtgttttttgttcttaacatcagactactggtctttttgtttgagctcaagtccaaattcaaaggacttgggcttttttaattatttattcaacttaccgtaaaaaattatacacttagtgacgaaatttttgctattcaaagtgctcaaaaagagacgcgtaatcgttatctaaaaaaacaaaaagctatgttggcagaacatgatcttttacccgaaaaaaagcgcaaaccacgtgcccgcatgttatcagagctgaatttaaacaacgatgatgctattttaacttttgccaataaagttaaggttttcaccagtggacccgagttgtttgaccaaataattgctgatcttaagcaagctaaaacatcgattagtttagagttctacactttttataatgataatctaggaaagcgtgtcttacgggccttagaagaggcttctgctaaaggagtaaaagtcagagttatttatgatgtctctggctcacgtggtactaaacctgctttttttaatcatttaagagagcttggtggcgaagcacagcctttcatttctacttctaaaaagcattggtttactacaccacgactaaattatcatttacaccgcaaattaatcgtaatcgaccatcatattggctatattggtggctttaacatcggtgatcagtacgttaatcaatctaaaaaatttggtcattggcgcgatacacatttacgtgttgtgggtcaatcacctatcctaatggagacacgctttgccatggattggaatacttctatcagacgaactgcattacctaaatttgatctaagcgaattacatgcttttactgtcgaacgtaaagatcttgacaacgatgataacgtagcaatgcaaatcgtttcttcaggtcccgataaccaacattatggcattcgccgaggatatgagggcatcattgctggggctaaaaactatatctatattcaaacaccctatttaattcctgaagaatccattttagaagcattaattattgctgctaatagcggtgttgatgtacgcatcatgatcccttgcatgccagatcatccctttgtttaccgagctaccgaatattatgcaaaatatttagttgctcatggcgttaaaatttacaaatataatgatggcttcatccatgccaaaacaatggtttctggctccaatatctcatctgttggttcagccaatcaagacttcagaagttataccttaaacttcgaggttaacgcttttaattacaatattcaattaactcaagaacttaaacaaatttttgaaaaggacctagctagttgcagtcttctaactaatgaatactttaatcagcaatctaaatggcttaagtttaaacaatacttttcacgtctgttggcacctattttttagaaataataaaaccacgaagcaaaaacttcgtggtatttttttacagattattataaagatcctgcatttcatcatcttctggagctaacttaagatatctttctagcagttgttttgttatttcatcattattttgtacattaaaaaagattatcatttggcgcaaaaagtctggattatccttgaaatccggataagctagtaaaaattcgctctgtgctttctgaatatcatccaaatcctcatatgataatgccatattccaatgtgcctgtggctccacgctttcctcatctaagttactaaataaggcaatattctccttagcctggtgttcatgaacatataggttagatagctgcatacgtaaatcactattgtctggcgctacttttaaccccttttcaagtaagtcacgagctgtatccaattcattcaaattagctgctgcacgtgctcccattgaataaagtgtttcatccagttcattgtacgcttcctcaatacttgttcattgtcatgctgatgatcataagcttgtgctaataatggatacgcatttacatagtcaggactttgctcaatcacttcatctaagaacttaattgcctgcttatcatcacctacagataagagaactaatcctgcttcatacttagaatcaatatctaaaatactatttgcatgttcacgaataactttggcagcttcttcataattacctaatttggcaaaagtcgcaaataatctttggtacagatttacttcactaaaagtactttgacgtttgattaaatcttgatataactcaagtgcttgttcctaattaccacttaaatattcaatctctgctaaaccaaatttaatagcatcttcttctggagctaattgtagtgctcgtattaatttgtccttagctgtttctattaagccgttagtttggtaataatcagcttgtactaatagactatccaaataagctgaagagctctcagggacattatataaaagcgacagaccatcgtcatcatcgccatcatttaacataatctctgccaagtaaactttaaataaatcttctttaggaaatttagctattaaagctcgatatatttcttttgctaaatctgtaaaacctaagccagttaggttttctgctaaagatgacaagacctcgggagcatcattatctaaagcttcttttaaaaggtgtttgttttgtgaaaaatcatgattttgaattgcatctagtaattgttcagaataactcataatacctccaatcaagttaccattgtactaaaaaaagacgccggaacaaagtccaacgtcctatcacattagttaagctattacttaacggcatccttaagagctttacctggcttaaatgcaggtacttcactagctgggatttcgatttcatcaccagtttgtgggttacggcccttacgagcagcacggtgacgtacttcaaaagtaccaaaaccgattaattgtaccttttcacccttagcaaggttttcttgaattgaatcaaggatagcatcaacagtatttgcaacttgcttcttagttaacttagtttttgaagcaacttctgaaactaattcagccttatttgccatgaataattcacctcctgaatttgaacctaatgttcaaaaaatttttctttgtttaagctaaacaaggaaaaatgatcacaactaatcatgttccctaaaaacaaaaatatcacaaaaaccttataacaacaaggttttttatgatattttgcttatcttttatttacgtttacgtggtaaaatcttgattggtgtacccgtaaaatcaaagttttgtcgtaattgattaatcaaaaatcgttcatatgagaagtgcatcaattctggatcattcacaaatacaacaaaagtcggtggattcgtacttacttgggtcatgtaataaacacgcaatctcttacccttcaccattggagttggaactaacttacttgcttcaagcaacaaatcatttaagacactagattgaattctttgattttgattatcatagacttctttaaccatattaggaatttgatctaatctttgacctgtcttggcagaaacaaaaagaataggagcatagtccaaatattgaaattcatctctaatttcacgttcaaattctttagcgcttgtactattctttttcggcaaatcccatttgttaacgacaatgatgattccacgacccgcctcgtgagcatatccagccacatgcttgtcttgttctctaatgcctgtacttgcatcgaggacaagtaaaaccacgtctgaacgctcaatagcactcatagcgcgcattacagagtacttttctgtcttctcatacactttgcctcgtcttctgattccggcagtatcaacgaccttaaattttacaccatcatgagtaaacggcgtatcgacagcatcacgagttgttccttcttcattagcaacaattacccgatcttcaccaagtaatttgttaacaattgaagacttacctacatttggtcgaccaatcacgctaaaagaaataacatcatcagcttcagtatctttatcgtcaggaaaatcattaacaatctgatcaagcaaatcaccaataccagtaccatgactacttgaaacaggaatcggatcccccaatcctaaactatagaaatcataaatatcgcttcgctgttcaggattatcagctttatttacagctaaaataactggctttttagtacggtaaagaagatgagctattctttcgtctaaatctgtcacgtgatttaccacattggttaacatcacgataacatctgcttcttcaattgcaatttctgcctgagctctgatttcttcctcgatcttgccaccttcccaggtaataccaccagtatcgatcaaatcaaacttatgccccatccattcggcttgagcataattacgatctcgggtaacaccaggtttgtcctcaacaatagctaaacgttgattaattattctattgaaaagtgttgatttaccaacattgggttgaccaacaattgcaacaactggtaaaaccatttctcgccctcctttactaatctaaacataaataaaaaagccgactcaagtcggcttttttataaaatgactacttacggtcctttaattggtcaccaatgatgtcacctaatgcaaagccgttgtcgttatcactcatgtacttcttgtttactgaattttcgttacgtgaacgacgtggacgagaattatgattttctgaagaagcatttgagtcagcagccttgattgaaagtgagattcttctatcacttgggtcaatgttcaaaaccttaaccttaacactttgaccaacctttaaaacatcgcttggcttgtcaacatgcttgtttgagatttctgaaacgtgtaccaaaccttgaataccatcagcgacttcaacgaaagcaccaaagttagttaatgactttacttcgccttcaaaaatatcgccttcgtttaagtcagctgtagcttgttcaaatggagaaggttcagtttgcttaatagacagggaaatacgatgtctgtcattgtcgataccaatgaccttaaccttaacatcttgaccaacctttaaaacatcgcttggcttgtcaacatgcttgtaagaaatttctgaaatatgaactaaaccgtcaacaccaccaacatcgatgaatgcaccgaagttagtcaaacgtgaaaccttaccttcaacaacgtcaccaacaactaattgtgatgcaaccttgtcaaatgcttcttcacgttcttcttcaactaaatccttgtgtgaaaggattaagcggttcttgttaggatcaatttcggtaatcttaagtttcatagtcttaccaatataaggcttaagatctgaaacgtaacggtttgaaattaatgaggctggtaagaaaccacgtgtaccaacatcaacaattaaaccaccacgaactgatgaagttacagtaccttcgacagcatttccgtcttcgaagtctttttgtaacttgtcgtaggcttctctttcctttaagcgggtaactgagaagaagaattcaccattttccttgtcgccaccggctcttcttaatactaaggccttaaacttgtcaccaggcttaactaaatcacgtaagtctgcgttacggtctgaagtgtattcacgacgagtaatgacaccttcaacaccagcgttttcaacaccaacatcgatttggccgtcttcaatgtctaatacttcgacatcgacaatatctccgacctcaactccttgcatttgctttaatgcgtctaaaaattgattactgttttctgacatatgtacctcccaatatcatgtcccattttataggaaaccgagatatttttctactattttgtgctattttttctaatttttttgttttttttcgatttgagctaaaattgcctctacaacttcgtcaatcgacatgtttgtggtgtcaatttcaattgcatcatctgccttttttagcggtgaaattttgcggtgagaatctttataatctcttgctgcaatatctttttcaatttcatcaactgtttggtcagatttaataccacgctctttaaaatctaataaacgacgttcagcacgtgatcttgctgaagcaactaaaaagatcttaacttcagcgttaggtaaaacagtcgtaccaatatcgcgaccatccataatgacatttgtcttgcctgccatttcacgttgcagacttaccattttttctcgtactttcggcaaagcggatacttccgaaacattagctgaaatttcaggcgttctaatttctttagaaacgtcctttccagctacatatactttttgctcaccattttcagatttcaattcaattccatcttcatcaatggcattcaagatacccgcttcatcaccataatctaagttatgattacgagcaatcactgtacatgcacgatacattgcccctgtgtctatatagacaaaggataatttacttgcaatgattttagcaactgtacttttacctgctgatgcaggaccatctactgctacttgcattctaataaaaaagagatcttatcatcgaccccttttatcctttctgaaagattatttcaacttaagtgtctgacctgcttcaatatttgaagagtctttaagattatttaatctggctaattcatcaacagtcaagccattcttttctgcaatttcatttaaagtatctccactttggactaaataagtcttaggagtagcagaactactagatgagcttgaactagccttttcagactttttcttgctaaaagaagatgatgaggttttcttagtcttaacagacttggatgatttagaagaaaccttcttaactgtttgaacttcttcagctttttctgaatggcttgaagccaaacgatgaacaactgggataagtgcaattaaaataaccgctaaaattataataactgctatccaacgtgctgatccactaggctgactatcttgtgagcttcgcttttcagtaggtcgttcatagtgctgatatggcccggttgactttttatccatcaaaaattcctccattcacttaacggattaattttagcatattttaggatgctttgaatatgaaaaatcccatcaacttaaaaaattgatgggatgataacttaattcaaattaaatctcttacgaacgaatggcttaattgttttcaaggtagcttcaaacaataagtaaacagccacagcgttaattaatccttttaacaagttaaagggcatgataatactaaaaatgtaggttgacattgatggtaaatgcaataactgacccaagtaaactttctcagtaaagcttaacaaggcactatagctattaatagcaggcaagtttggtaccgctgttactgcgtaaataggagtcaaaacgaaggcattagccaatgacatcactgctgccattgcgataatcccaattaccaaaccacaaattggtttaactctgcccatcattgtcttgcggttatccgcactcacatttttacttaataaataaaatggaactgcaaatgacattgaagctaagaatgctgctagatttccaacaaggcttggtaatgcaaaaccactaaaaattaaactaagtaacattcgaattaaagcaataataactcccggtacaatgccaaaaataaacattccaattgtaataatgacatctgaaaaatcaaactttaagaaggcaactccaggcatgattggaaattcaaatttcataactacaaaagcaatacagccaattaaagcatatgcaatcacattagttaaactactattcttggatttagcttgatccataacttactttcctttcccaaaacaaaaggtctattgcttcagcaacagaccttaaaaagtgtagtaagtttttttagcctgtcttcttccatctagactttaactatcggtatctaacgattcaaccactgacgtgggtcgcggactttcaccgccggtcgggactttcaccctgccctgaagacaataaccttgaatatttaattacagttataatttagttcaattgcattaatttgtcaacttcatgcttcgataattcccgatattgccctgatgtaagcgaatccagagttaaaaaggcatatttttcacgagcaagcttatcaactaagtgacctactgctttaaacattcgcttaacttgatgataatgtccctcatgaattgtaatttggacaatttgtgtgtctttcttatgatcagttttcaatactttgaccttggcaggcgcagccttaaaatgatccaactttactccttgagtcaaggttttaatttcatcaggagttaaaatccctttaatcttggctacatagaccttagccacttcatttttagggtgcatcaataaatttgctaatttgccatcgttagtcattagcaataaacctgacgtatcataatctaatcttcctactggatacaaacgatatggtaaatcttcgaaataatcaactacagtttttctaccacgatcgtcttctgcagtcgaaacaacgccacgaggcttataaaacaaatacgtgtgtaggctttcccgctcaattggctcatcatcgactgtaatattactaaaagtatcgactttagtacctagcttagtaacaacatgcccatctactttaactcgaccggctacaatcattttttcagcttttcttcttgaagcgattcctgcttccgcaattactttttgtaatcgttctgccattttctatccctctttttctaaatgtttgtctgcgctaccttttgaatcgaataagtcaatctcctcaccatcagttgtatcctcaaagtcttcgattaacggtaaatcagccaaactttgataattaaaatattgtaaaaaataatcagttgtaacatacaacttaggatgacctggagcatcttttttgccgtcttgtttaattaatcctcgccaaatcaatgtctgtaaagctcctgatgaatttactccacgaatatcatcaatttctattctagtaattggttgtcgataagcaataattgagagaatttcaagtgctgattgactcaaattcttagttaaatctttttgaaaatacttttcaattatcttagctgtctgttgactagttgtcatcttataagtatttgcaatatgaattatttgcattcccgagtctggatcagccttcattttttgctgcaaacgagtgactaactgacctagctcttcaccatcaacttcaagtagttcaattagattttgctcctcaagcccattgtcacctgcgacatacaaaagagcttctaaatttgctagtttacttgccattcgtatcaattctttctaaatttaaatcaccgaattcacgtgcttgtgtaatctgaattaattgttttttacacaattctagtgtcgctaaaaataagccaataacatctgagatattctgcattttgtccgcgcaagcaaagaaactaacttgcctttttcgtttcaattgtccatgcaaaaaatccatcatctcattgatcggcgtttctgctactctaattgaagcggtatctggttgctgcaacttcaaacgatgtaagaccatcgtaaaagtcgtcgctaattcttgtgcagttatctgacccttaggcagcggttgaactttagcagtggttgatacactagcttctttagcaactgtaatcggtacttcttcattacgttctttaaaataagcagatattttcttaaacacagaatattgtaccaattgttgcactaattcgtctcttggatcttcatcaggttgaatatcatctacaaaatcgttttgaggcaacaaatactgtgatttaattcgcaataaagttgatgacatgacaaaatactcgcctgcaatttgtaaatttaagctttgcatttggcgcaagtattctaaatattgactagttatttgggcaattgggatatcataaatatcaattttttgcgattggatcaaatgcagtaataaatcaagtggtccttcaaaattcggtaattctaaagttaagttacttttgtccattatcttcttctatcgtttttaataaatttgtatattctggtacagcagttattcgtttatctggatattcgtgctttagttcatcaacaattttccgttcataactaatctcacgaaaaccaggagctaaagacaaatatctaataattacaaactgattagatacttgggttcctattacgcccaccatattattttgactattacgataaagatacaaaataaagtcattttcatcctgattaagcgtgatttcttcttttaagttttcgatatttttaaaatcaggtaaataggatagtaatcccattgctatcttctcataatcttttttatattgtattagcatttaatcacctaaagacgaggatgtgtcttctgataaacatttaaaatttgcttttgtgataaattggtatagatctgtgtcgtgctaatatcagaatgtcctaatatttcttgcactactcgcaaatctgcgccgttttctagcaaatgtgttgcaaacgtatgacgtaaagtgtgtggcgtgacatctttagtaattgccgccatttgacaatactttttgatcatctgccaaatagcctgtcgtgtaatcttttttcctcgattatttaaaaaaatatgttcatcgcttttccctacttgtaaaattagcggatcacgaacttcattttcatatttttttatccaatcaagagcaacaggactaattggaatcaatcgttctttttcgcctttaccaagaacccgaactaagcctaaatcgtcatgtaaatcctgcaactccaaattaattaattcgcttactctcattcccgtggcatataatgtctctaagatagcacgatcacgtatacctaactttcgtttagtatttggctgctcaagtagcctattcatttcagcttgagagagagctgtcggcaaacgacgttcttttttaggcaaatcgatttccaacattggatttaacttttgaatattttgccgagctaaccattgataaaatttacgcatgctagaaataagtcgactaattgagctggttgctttgttcaaatcacgctgccgagctaaaaacgcatccacatcgcttgcttcagttggccatgaagccataccttcattttctacaaaagtttgaaattcttctaaatcttgacgataagcattaattgtattatcacttaatcctcgttcaacttgactatagcgtaaataatcatcaatttgatcttttaaattaatcttctccattatcgttctcttctggatccttaattaaagtaatcgtacctgctgttttatcttcttcaattaatccagccttgagcaaatgaccgaccgcacgtttaaaagctgattttgaaataccaaagtatgatttaatttcttgtgcacttgatttgtcatagaaaggtagagtcttggtttctcttctccgcaaactcatcaaaatcatttgcgcatcatcatcaatttcttcaaaagcacgaggcaaagcactcaaattcaaacgtccatattgactgacaccgactactctacccttgaattgctcacctagtctcataggacgtggcatctgcgattcatgtacaaagccaagataataatcactagttaaaacaaatgctcctatctctcgtgtaacataaaccgttgcaaagacattttcattattcattccacgtggaaagttagcagctaattggtcaaaaatattttcatctgctagcttagcccaaatacgatctttttcgtcagtttctaatcttactaaaagtcgatcatcacgtcgaggccatctttctttttctctaggaagatcatccattgataaaacaacgtctttatcaggtagacctacatcaacaaagacgcctaagcctggacgtacctcggttacttttccccaaccatattgatcgggttgcgcgaatggcaaaaattgtgtcatttctcgatcatgacttttattatcataaataaaaccttcgacttcatctccaattttaggaatatcatcttgcgtaatctcgatcttcttcaattcataagtcagtccatcaatttgaacataataagctttatcgttttcgtcagtaatttttcctttacgaactgttccaagcatttaaaaatctcctactttacatattcttacatataagtataagagatttttatgcaaaataaaatagccagcacttaagctggctattttttgattagctaatctatctaaattatattcttaaaattaaaggtttgagattttgccttggtagatagcaccacgacgagcgtcaacagtaatagttgaaccatcagaaatcttgtcagtagcgtcagtagcaccaacaataactgggatacctaatgataaaccgataactgcggcatgtgaagttaaacctgaagcttctacaactaagcctgaagctttcttgatagctgggttgtagtctgggtcagtagtcttagcaactaagatgtcgccttccttaaccttgctatttgcttcttcagctgagttagctacaacagccttgccgataactgaaccgttaccaacacctaagccttgaactaacttgttaccgatgatttgtaacttcattaagttagttgtacctgagtcaccaagtggagtacctgcaacgataattacaaggtcgccatcctttacgtaacccttttccttagctaccttagcagccatttcaaacatgtcatcagttgacttaggcttttcagtcaatactggttgtacaccccaaacgatacccaatgagtgttgaaccttttcgtcaaaggtcatagcaataatgtcagcattgggacggtacttagaaatcatacgtgcagtgtaacctgagttagttgcagtaatgatagtcttaacacctaattcttgagcagtacgtacaactgattcaccgatagcttcagttacgtttgaacccttgtaagcttcgaatctttgaagagctaaagtattacgcttaagcatttgcttttcagtacgttcgtcaatttcagccatagccttaacagccttaactgggtaaagaccatttgctgattcacctgaaagcatagttgcgtcagtaccatcaagaacagcgttagcaacgtctgaaacttcggcacgagttggacgtgggttttcttgcattgagtcaagcatttgagtagcagtaataactggcttaccaagtgcgttagccttgcggattaggctcttttgtacaaatggaacttccataaatggaatttcaacacccatgtcaccacgagcaaccattaaaccatctgaaacttgcaaaatttcgtctgcgttgtcgataccttcttgagattcaatctttgggaagatcttaacgtagtctgcacctgcttcttcacaaagcttacggatgtctaagatatcttgagccttacgtgcaaatgaagcagtaatgaagttaataccatagttcaaaccaaacttaatgtcatcagtatccttttcagtaatacctggaaggcgaatttcaacaccaggagcgttaacacccttctttgaaccgattacaccagtgttttgagcttcacaaacaagttctctctttgagtcgtccttttccttgatcaaaaggtcaaccaaaccatcatcgattaatacgtgaccaccaacgtgggtatcatcgtataaaccgtcgtaggtaacgtggatcatgtccttgttacccttcttagtggcatccattgatacacggatcatgtcaccagtattaatagtgaacttgccaccttcttgttcagtggttctgatttcagcacccttagtgtcaaggtcgataccaagaagtaaaccagtatccttttccacttgacgaaccatcttcatacgagcaaggtgttctgggtggtcaccgtgtgagaagttgaaacggaatacgtttgcaccagccttagctaaagcagtaatagtttcaatatcgtttgaagctggccctaaagtactaacaatcttagttttcttcattattaaaaaaatcctctccaaaaatcaactaaattaatatttagtcatttcttcatttacatccaataacgcataatcaccttggtgtttaccgtcaaacaaatcaagaatgtcgtgggtattaagttcaccattctccatgccgacagctaaaccgcccttcccatcgagaagtaacttaacagcataattacccatcttagtagcattaactctatctgtaacagtaggtgagccaccacgttgcatatgcgcaaggacattagcacgagcatcaaagtcaccatatttaaggagttcgtccttaaacttatcagcagccataacgccttctgctaaaacaatgataccatgatctttgccatctgcaaaaccacgagtaagagtttctgcaatttccttaacatcgtatgaacgttcaggaattacaattgcgtctgctccacttgctacaccgacacgcatagcgatatcaccacattcacgacccattacattaacaacgaatacgcggtggtgactgcttgcagtatcacgaattttatcgatagcatccatagcagtacgacaagcagaatcaaagccgatcgtgtagtcagtataaggaatatcattatcgatagttcctggtaaaccaactgagtttacgccgtggcgagtcaaggctaaagcaccatggtatgaaccgtcaccgccaattacgataaccgcatcaataccgtgtttctttaattgctcaacacccttttgttgcacttcttcttgtgcaaattcagggaaacgagcactgtacaagaaagtaccgccttcactaatcttgtggtcaacattttccgtggtaagcggaacaaagtcacctgcaaccaaaccagcgaaaccataacgaattccaaagacttcaagcccatgatggatagcagtcttcgtcacagctctaattgctgcattcataccaggggcgtctccgccactagttaaaataccaatccgtttcatgaattcacctcatcatgattattttgtgtaatttctcacatcacataaatattaacattttttaggcaaaaaagctcacaaaaattgggctaatttatgctttctttccgtatttaagtttgttagcgagactgtaaaatagtttgtgtaaggatgaatgattccttaaatttatttctttaaacattagaaaaaggagttcctttctcgtatgattggtttgaacaaaaaaacacatacagaaagaagaactccttcatgaatgattttaccaaagattttgctcaagctctattcaatccagacaaaataaatgatttattgcgcaaagagctacaacaggctgttaataacttgttagaagctgaattgactgcctttctgggctatgatccctatgccagaaatggctggaatactggcaactctagaaatggtgcttatttccgcaaagttgatacgcaatttggcccaattgaagtgcaagtgccccgggatcgcaacggtcaatttcatcagcacacgctgcctgactacaagcagcactcggatatcttggaaagcatgattatcaagctttactccaagggcgtgaccaccagggaaatagccgatctaattgaaaagatgtatggcagccattacagtccagctcaggtatcaaatatttccaagcagatgattccaaaggttgaggcttaccacaaacgcaagctaagcgacaagtttttctgcgtctatttggatgcgacataccttcctttgcgccgagaaacatttgagcgtgaagcagtctatattgccattggcatcaagcctaatgggcacaaggaggtcattgactactgcattgcgcctagcgagaacattgaagtctggacagatatgcttcaaaacatgaaatcccgaggcttaaagcaagttgagctttttctttctgatggtgttgttggcatgaaaacagccttggccaggacttatcctaaagctcattttcaacgctgtttggttcatgtcatgcgcaatatctgcgctaaagtacgcgtcgacgatcgtgaaaagatcatgaacgaattcaaacaggtgcatcaacagacaaacaaagaagaagccacagctgtcctgcatgacttctataccaaatggggcaaggtttacagctatgttatcagaagcttgaaagacatagaaccagatctgctggtcttttataactatcccaagcagatcagagcttcaatttattcgactaacatgattgaatcatttaacaatgtgatcaagcgcaaagctaagcctaaggcagagtttccaactgaacagtcgcttgatgcttttattggcattcaggcaatgagctacaatgaccgttatttcaatcgaattcataaatgctttggtcaggttcaggacaccttagaatcctactttgattaaataaataattaaaaaatcaatttacgagaaagatctatttacacaaaagatttgacagtttcttgttagcacttacatccatcgtcaaagatagctttgtaatttgaactttattctttaaaattaacttttcgcaaattggttaagaaatactgttttttattttggtcaaatcgatcaccttgaaccttgactcctagtaaataaatatctccttcttttaaaatagagccaaatttttcataagccggtggaaaaataataatttcttgttcgctagatgtatcagcaaaactagcaaaagccattgtttttccatttttggtcctaatttgctttaacttcattaatttacccacgctaataccactatcatttaactgaaattgattcaatggtctagcgttaaatttttgtgcatatttttgtacagctattagaggagtagttgttgtagtaaagcctaaagctttctcttccatttctgctttttgggcagcagtcggtggctcagcaggcttaagtggtgcatcccccagaatctcagataaagacatattttgtcccgttaattgcacattagcaattacatctttgcagttaagcaataactcattgcgattatcttcgattgagtcaaatgctccagccataatcaatgcttcaattgcgtctacttgtaagaacttagcatcgattctacgcaaaaaatcattaaaagacttatacggtttagtattggcagctatttccttagcaaaatcaagacgtaatcctttaattgcttttaaaccaactaaaatcttgccatcttgtaaagtatagtctaattggctgtgattgatatcaggcggcaaaatacgaactccagcttcctgagcttgcatcgaatagctttgcgctttagcagacgttgatgaattgagcatcgctgtgtaaaatgcagcaggataatgaaccttcaaataagctagccaaaaggcaatcttggtatatgccaccgcgtgtgaacggttaaaaccatagttagcaaattgctctatataatgataaactcgctcacctacttctttaggatgaccttttttgaccgtaccagcaataaattttccacgttcttgctcaatgacattctgattctttttagacatcgcacgtcgtaaaatatcggcttcacccaatgaaaatcctgccaggatttgagctgtttgcatgacttgttcctgataaaccaaaattccataagttgattgtaaaatttgctttaaactgggatcaggataatgcacagtagccgtaccattttttcttgcaacaaatgcgtcaatattttgcattggacctggacggtataaagcgttcaccgctactaggtcctcaaaattgtcgggatgcaatttacgcaaaacaccacgaatcccaccagattcaaattggaagactgcatctgttttaccttgttgaaacagttccattgttttgggatcatttaacggaattgtattaggatctagctttacaccttgctgccgcactaaagctaaaatattgcctaaaactgtcaaattgcgcaatcccaaaaagtcgatctttagcaaacctaatgattcaacatattttttggtttgctgagttacaggaatgccgaaaggaccagcctgcaatcccgaaatgccagcaatcgaatcatcactaatcaccaatccagccgcatgaatagaataatgccttggcaatccctcaagtcctaaagcagtcttaaataacaatttattctcaggcgttgcatcaaccaataatcttagttctctagactcttgatatgctttttttaatcccattttatctttagagtacgggattgcgtgagtccacttagtgatttctggtcctgttaagccaaaaacccggccaacgtctcttaatacttgtttagcagccattgtaccaaaagtcaaaatttgagcagcatgatccatgccatacttttgatacatatacttaattactgtattccgttgaatatcaggaatgtccagatcaatatcaggcatctcatgacgagccggatttaaaaaacgctcaaacagtaaattatattggatgggatcaacttcagtgatacgcaaagagtatgaaaccagtgaaccacaagctgaaccacgtcctggaccagtagtaatttttactcggtgacaatagttaattacatcccatacaatcaaaaaataatcatcgaaccccatctgattgatgactcgtaattcataatttaatcttttctgatactcggctggaatacttttttgaccaaagcgcgcttgtaaaccagtttgagccaaataacgcaaatattcttctgaagtcggaaacttatcttgatgatatttaggtaagaccggtttttgaaagatcacttcagcattacatttctgagcaattttccaagtattattaattgcatcatccaagtcatattgatgatagcgttctaaaacattttgtgcagaatctaaataatgcgaaccagcttgcttagctagtggcaatatatcttgcaatttatctcccttagcaatcgcacgcaaagttttttgtaaaaattgctcacgtggccgtaaatattgactatcttccactgcaactaaagataattcaaattgcttagctaatccacggacataatcaatgtaatctatacttgcttttgaagcatatacacccaaataaagatcaaacgttaacttctttagttggcgaacataatcactgcctaatgcctgatttgtatcatgcagcgccattaattcactttttagattagctggtacgataatcaacaaatcatctaaatatttggttaattcattcagcgttaagaccttatcgttttgcccattttccgttaacaaatttaccgcgctagaaagtcgcaataaattatgatagcccttatttgttttggcaaaaactagcaaatcatatttttgggtgctatcaaccaaaccatttaaacgcagttgcatcccaagaagtggtttaattcccgcctttttagccaactcataaaaattgaccaaaccataagtcacgttcacgtcggctaaaccaaccacaggatagcccttctctttagcgtcttttatcaaatcacttaccttggttggactacttaaaagcgtaaaggagcttatgttttgaagtgctgctacttgcataaattaaccacctttcgtcattacaaacattaaattaagtataccaaattgaaccaatcaggtttgaatttgcgcttcatttttgataaaatcttacacgaaagaaggaatcattatgggtcgttatatcatcacaactgtatggagcgtaatctacatgttagttgtaggctttattgctggtcctttaacccgaagtgcttcattcaacggcacagatttaagaaattgtgtaatcgttgggatcatttttggtattcttttctcagcaattattgcgactattactgctcgttcacacaaagataatagtaaatacagtaagttaaaataattattcaatctattcaaaaaagacgtgagatgtttttattctcacgtctttttcgtttggtttagtaaaacttataattcttttttgtatctacttcgactggtccatgagtcaaatattcgctaaacatttgtacatagtccttatccaaagtggtttcaattttgtccatactatattcaggataaaatcccccacccatagcacgatagttgttaactgctaaatgataaatctgatcatctttgattggcttaccgtgcaaagttagtttagtcagccgttcacctactggtctggataaatccgcttcatattcgactggataaaagacgtcaaaatgatacaacattggcttaggcttaatccatcgatcaataaagccaatgtttcctgcttcatctttcttcaaaaagccagcagagtgctcaataatatgacgtaattctttaccagtcagcttcacacgacacaactgattagcatacggataatttaacaaaacatctctcatagtaatggtcttatcaaatcccttagcagtctcactcatcactgcagttgccgaaacatcagctttagtaaaccataattgcatttgctggattaaattaataaatggcgcgccttctattctgcctttcattgcattttcaattcgagcaggtttatctaaatgtgcaattggttgatctagccatttttgtgttcttttatccaagtcagatacaatatcaacaattacaggatcaggatcataatctttagtgtcaatcaacttagtggacattgatttgattttcttagtatcatcatcaatatcaagaaccacttcagctacagcttcaccgcgataacctggttgaacaatagcagtatcgcgtgtaaccaaatttaagcgccgatgctggtgacctgtcaataggacatcaacttctggaattttggttaaaatctgataaccttcattttcaccacgattaggttcagtcgccttaccagtttcaggatcactttcaaagccaccatgatacatcacagctaaaatatcaacctgagggcgtaatattttggcataatgcttaattttttcgtaagcagaggcaaactttaagccttttacattttctttaggttcccaatgtgggatatattgcgttgtaatccccaataaaccaatctttaagccatttctcttgataatagtgtattctctaccaaaaaatggaacttctgtttctgcatccagtacattatcattaatgattggtgcctcattgttatcaacatagtagcttaaataatctaatccaaagttaaaatcatggttacctaaacagcgagcatcataccccactgcattataagcttgcgtaaaaatacgtaaatcactataatcgccagttgaatgagcataggaagcaagtggtgagccttgcaaacaatcacctgcatcggtaactacaacattgttatcaccatactttttcttttcagatttaataactgagctaactctactcaaactaaaaggagcatgatagtcggttttattttggtaatcagttggcaataaaaatccatgtgtatcactagaatgtaaaaatactaaatacatgtttgttctcctatattattattgtgcgttaactaaagcatttatcaccaatttaatggttaatatgctcactgtttgttagttttatttagccattttttagtattgttttcaactacaaattactacgtctttcttcaatatacttttcaatttgttctaaatcagcttcagtagcaagatttaaaatgaagctctttgttgttgaacgtttattaatgtaaagcttacgagccttatttttatcatcccaccttttatttgccctttttcttgcttcacttaattctgccattagaatctcactcctagccataataaaattcttaaaatcaaaaaggtaaatgcgctaatataaattgccttcgttaaaaatttgtcccaattaatttttttcatttgtattttctcctattctaaattaagatataggaaatagaggatttcaatcccctattcctattatttattttgtttaaaagctaaagcttgattccgaataattgaaggattgttgcgagatttgcaagtaactcaataatccaaaaaaatgttttaagaatcagctttagctttttctttctgcggtaggctttccgcatatttgtcacctcctagctccgattcccttacctcctttcactatatagaatacacgcttttacgtgtaacgtcaacatttttataaaaaacgcaaaaaaagaccaccctaggatccttgtcccagagcggtctttacgatatttggagttttcttcctttattcaattacttttaaatatttacccggtacccattgcttgtcggtacctagtttataacatttcatgcctttaattgacttcacgtcaaagtacttccatcttgtatttgtcttaatgtacttgccagtgtaatgacctgtgctgtctattagctgaatcatccagctaggattacagttaatgattggagcatataccacgccagttttcttttctggcttaggcttaggcttttcaacttgcttagccgtctttttaaccgcactgtctttgtggaggtcaatcagtgaaatgttgccatccacattaaatcctttccagttgtcacagaattgccaaatggctacaccgtccattgatggaaaatagttaaagtttggcgtatatgctagatcagttggataagacgctacccagatgcaagtgccgaatttcttcacgacttgcttagtatcaattgcagttctaagtaaacttgcaccagagtacaagcctactttataaccagcatcgtgacaaattttcataaaagctaaaatcgccttggtacttgccgccttaccaccagtaacacaattgccactaccagtttcccagtcaagccataagtagcgcttcttgctgatattcccagtttgggcacgactcacaaaaaactttgcttcagctttagcacgactggcgttataaccgaaagtcgcaaagtgataagcgtggacgtacatgtgattagcatgtaatgacttaatttggtaatgagctttaggattaatgtaacccgtaccttcagtcagtttgataatgccgaattttgcaccagcattatgataagcactcatgctagtgccttgatatacagccgcatcaattcctagttgtctacttgccatctgcagtcacatccttagctggttctgctggagcaggactttcaggctttggcaattgatcaactggttgcatgatgtctttttcgtccacatcttgatttacagcaggatccttttccaattcttcaacgtcggctaagcgcatagcagctacagctttttcaagagcgccatagatcatgttagctgttacgtcattgattcccatataatgtagagcttgattgatcagttcataacccatttggcgcttttctttactagtaccacccaagaactctacttcatggacagcattagttgcaatcttgcctaaaacatcataggcttggccagcacgggttgtgcggttaatttttgccttgttgcgagcataggcacccgcaattacagcgataaagtaactcgctacagtaatacctaagtaaatccaatctttaatcgtcattttctaattcctccaatttcttttttaatcggtcattttctttttcaactttaagccatcttttacgatatagctccacatcttcagccttctgcttaatttctttgtctttctcagctagcgtgctggcaagcgtattttgtttgctgctactaaatactttgtagaaaagggtcaccgcacttatcagacccccgacagcagttatcagatatcctatcacgttcccaatatctttcatgcggcacctccttaggcgtcgctagctgtcagatagacaaagccaaaaatgattaagtcgccccaagcagagtgccccattcgataataagacgtgaaaatgccatgcgtgatttgcagtaaagctaagaccatgcacacaactccagccaacactaaaaatacgttgctgacgataatcagctggatttttcgcttggttgatcgcatgtatggcactaaaaaagccgttatcatcaacaaggcacccaaaaggattaaccctaagtcgatatagcgactattttcaatactttgaaattgcggcggatagataaaatagtgactatcatgaaacagccaaacacctttacctaaaataaaaagaccaattaacagttcacaatttctaattgttaatttggccttccactggtttagcttcttcattgctaccaccaacgatttcttggtattcagcttgagtaattaagcccatatcaatgtaacttcttaattcatcttgactgataaaatcgttatcaaattcaaacttgtaaatctcaaacattacttattacctccttcaattgctggtgtggtgtttcgtgttggttcagtaggttgagtagcaggttgagcttgtttctttaaatcttgcacttcttgcattaacttgcctgtttgaacgtttgacatagcaaccaaagtagtaagcttatctaatttcttatcaagttcatcatttgattgagtatttgattgactatttgattttaattcagtaacagctttttgaacgtcttccacagtatgaagtagtgcttcacttgatgtgtctacccattcatgagctgtgtaatcatatctttgatgtgtaaagtttggatttggagttttagttacataaggatagcctttattactcatgtcctttgtggtggtgtatggaccatcacattctctgtattctccattaataattccagagatccaaaatgtattttcatttaattctgccattttaaaattcctttcttacttaaatagtaaacttttgcattaaaaaaccgccaggtggcggtctactgtcgttcttcataaacgtaagccttactattctattaacgaccaatctgaccattcaaaatttacttttgctcttttgtaaattttaagttgtaaggttatgcaaaactgtaattcccagttaggcgcaatttgtatgcactttaagtatccataaccggcatcttgagggacattggctggaatatccccatttattctatagtcgccatatgataattcatttgcattatcgtctttgccaattcctttatttgaaagataatctgataaatttgataagtcattaatgcttgaaggtacttgctgcccgctaaagtatatttcagccatattacgccacctccctagattctacttcatcgaaaaccaaattaaagccagaaaagtttttagttcctgtaacgccaatattggtactgcgccaaccagaggacgcaattaatttgtcatggttcagcattacatctgccatgtttttctcctttccaaaataaaaacagcccatttaggactgtcgttgcataaaaacgttagtcttagactaccgtttgccatgagcgtttactttattatgccattattagttagccacttatgaaacgctccctacatcttgagaagtaaagccatacacctgaaatgtcagattagtatatgaatattgattgtcataataggattttgtgcggacagctaatttggtgttgtccgtaaaccaaactgacatagctccgggatcgccttcattctgacttcgcttgttatttatttcaccgcgcttcaataatggcgtaagcaaatcattgctaacaacattattgtcataatctttataaaataaattgacaacaatttggtaatattgaacatccgaatactttgcatcagcttgattaaaatattttgtcatatcaatagtaaaagactgatggttccagtcgctgtgattatcaccatcaatataaaaaacatttaggttttctgctccatttccactaagatattcattttcgcctagagcataacctagaacttttttgccatttattgttagagccatacggtcgccttctttctttattctgttatttcatacaacgtatttgggtctttagtagcaagcttatcgtaatcagctttactaattacggtaggcttcttcatatatcctgcttcaatcgctgtaactctgttgttagtgttattcaggtcagattggttagccttgcctgataaatcaggggctggaatattaatgttgcctgaactatcaggttgaacattattaactgtcttaaccttgccagcattagcaattaaagttttcaggttattaacaataccgtcagtatcactttttgtataaacgtcagcggaattagctttgccattaatcagtgattgtaggttgctcaatccactcacttgtgtggataagtcgttcaagtggttatacagccactcaatgttaatcttttgatcgcctacaaccgcttgcgaaggctcatcgttcatatcatagacaccaaaaactattgagccgtctgctgcagggttaatagaagcatcatgtgcagcttgtggactatcacatttcacgaaggtaatcttttgccctagcttttgatcagtttgtgacttggtatagtgatcagtttgaatatttccgtttgaatcaggttgaatattatctaccgttttgaccttgcctgcttgtgcaagtcttaggtcagtttcttccttagtatagtaatttttaatagtgtcaccagttacaaacttactgaagtccactttatcaaattgctgtttcaaggaattcattgacgctacagtatcagaaacttgcttacttacagtagtaagtttttgatcattttcactaatactctctttaattggttgaacagtatcattgaactctttcactgtggaagtcttccacgagttgtagtctgattggatgtcagcaagttctttagtcttatcatcgtttaactgttttaaagcagtatcacgttggtcattgattgacttaacagctgcagttatgtcagcttgattgctggttttaagatttgctaattgtttattagctgcatcattaatagccttttcttgagcttgccagcttgtagctaatgtattgtacttgtttgaataatcagtaaaatcactgttgatcttatcaagtactgctttagctcgtgattgtgtgtcactagcagttttacttaattgatcaatggtgttttgagttttttgagtagcacccaaaaggtggttttccatagcaattaagcttgatacataactatcattgataggcttaacagttggatcaactttaacctcaaaatagaaatcttgagtagtatcaacaacagtgtcaccttgcttaatttgaaagaaacaagttccactagctgtgtagcactggtgagtcatctgatatgaaaaatggcctttggtttcatcaatcatggtaaacttaccaccctcttcgccagagccatcatcagcaactacgcgatcgctttctttaatttctgaaaatgaaacttgttttcctgttaagtcatagggagaatcatcttcatttaaaattgttacatccagtactaaacctttttcagtggaacgtaaaaccctcgtatcatctgacacgggggttattgatttatccgtttttaatgttatcggtcgtagactcactttccttcaccttctttctgtgaatgtcttgaagttgagcatttcttaaccttaaactttggttttctttttctagttttgctattttaatggattggtttgctataacagttcccaattcattagctacaaattgttctaatgtgttcatttttacaaattccaatacttacttggtccttgccaatatttcttaatccatgaacctaaagtagattcagtactacttgttacaacaacattcttctgaccaatccatgcttggtttggcccaatgtgagtaattgcgccgccacttttgtcatggatattgacagagccagaagatatttgtaattcataattcgaactgcttaatttaataccactatcaggatcaccacttaagaaattaggaaaactgccaatattagtggtaataccgccaacagagacttcaaagttaccagtaattgttcctaatgcatggatggtatctgtatcaatatgtgatgcatccaaaataggaatgtgagcctgatcgacaaaaaagttgccagtaacttcaccgcttgatgtatcaacaccaaacagagcatgtggattaccactactgtcataaaattgaaggcctaagccattaaatatcatggaagagccgtcattgttcttggctttgatagccatgacatcattccaaccagtttcattgccgttagcatcaactggtataagcattcctccaccaccagaattaagataattgttgaagttatcaatgttattagccatttcttgcatgtgtttagcaaatactttaactgattcctcaagttctagtttttgcttgccagtctttttatcagtgacatattgtgcatctcctagttggaccattagattttcccatgcttgatcttgggatgatccttgcaaagtcagtgcatgatgaacagcgccaataaaactgtttgatctagcaatggcttgtcgtgtggaagtaattttttcattagtcctatcttcacttgcttgaataagtaagtgttcatagctggtaggtaaattacccagcgtaacatttaagaactgatgagagagacagtcccacgttgtagcagtaacttcagccttttcagtgatttcataagcaggaaattcaacatccacatagtcataaaggcttaattgagtaaagtcttggtcgttgtcagacatgtcttgataatcaagtgacgtttgtacttgcatatgaccatatctgtgttcaattaaatagtttttaccaatttgagtagcttgatcaacatcagcttgagtagcaacaaaagacccatcaggttgttgtcctgataggtcttgatcattatgtttaaagtagctgctaatatctactgtatttacgctatcaatgttaggatttacaccaaaaccatcagcatagagcggaccaactttaacggttacttccttattagattgatcaacatttgcattgtagttggtgtcagtatctgctgaattatctttgtcagcatcagcagatgtaatagtagaactcttatcatcaatgtcatcttcacaaagccatccagttttgccttcataagtaacttcaatgtaagtcttaccatcaccagatttagcttcatgaccattaactacttgaaatgtcttaccattaggaattgaccagtttaaagcattcttgctatcaggtgttgcatagatttcaactttgctatgatctttaagttgattattaataaagtcatcaaaggaatgtggtttaactgacccatctttagtgtagttaattgaaccagattctacccaaccatttcttgtgtgcatgtaggttttaccgccttgagtaattgtcttatcaatcgtagacatcccttttttagcggtaactttgaccttcttttctttttctttccaataagagccattgcctactttatgcttatttttgcccttgcctacatatttccaagctttcttctgtgagctatgtttaataacagttgtattagatgacaccatcttgtggtctttggtgaaatgatacttaacagcgccatctttaacataaccgtatccagaattgctataaatgcggtagcttccttcttgtgtaagtgacaagtgtggaccatataaccattgatgtggtccgattctgtaccatagatcaccatttgagttacgttcaaccatgtcatagtcaataacagtaccatttttaacagtccaatcttgacctagtgacttaacaggatggtgatcaggaccaatttcaggtgagtaaaatactctaattgattttcctttaccgtaagctactacagctgatccatgtacagttacgcgagaacctacaccttcactatcaagtggattactactcttaacagttacagttcctgatacattgttaattgcataagcacctgatgtgtcaaaattaatccacttagaatcaatccagccgccaccatcagtttgtgcaattggataccagctatcgctattaacagtgttaatttgatatttaccatcaggagtgaatgaaccatcattaacaatctgacctaagtgcagtttcatcccattttgcaaagtaccaatgattttttgaccatctacaggacaatcatagatattgatattgccgccagccatgtaagtgatacctactgaatcataagtactttcccatgtagcccagccttgccaatcatttttcgcaattgcttgacctggtacatacttagcgacaaataccgcaccagtatacatgttctgaatgttcttatcttgactaaaggtggttttgatatttttaccataggtaaccttaataccagaatcacgtccaatacgttttgaatgtctgatattccaattatcaaaatcaaattcaccgccaaacagtcctaaaactgactgtgtagcagtatcaccttcctgatcaggatcaataaacaaattacttgcttgctgaccacctggaatatttacttgacgtacatcattggtgtcagagtaaaaattaaactctctttgtggttccatttgattaagaatctgattgcctaaatcttgtgcagtagcaccgtttagttgaatatcatcagcaacggttgaattagcaagcagtgcatcaatgtgctctgcttcaactaccacattatctaattcaggagtaatgtggataattttaaaccattgatgtacgtgcttaggatcacagtcttccataatccatttgttaggttggatttccttttggtgcaatcctgatcttggataagtcatagttaaagaccaaaactgattagaattgccattaacctgacaatcaattgcatcaggaagaggaataccgctactagtaaaatcactagcaatactgtcataaaggtgtggcattgtcatcaaatcagaatagtcaccataattaacttcaggaattgtacctacagttaatttcattagatcaacctcctccaatttggtttgtattcagctttagtgatagtagtgccagtttcagcagtaacagtgatagtattctgacccttccacaatttaggaggatcaaggttaggaaaatgagtttgtatattgtatagattgccatctgcatcataagtatcaccagtagcgccactaagccaaaattcaccttccatattctcaaacgtgtaaggcaagccattgacgtaaagcgtgaaactaccgtttgctatgaagtgccaatctggaatagcagaccatttttcttcaccaactaccacaccgctatcagggagcggaatataagcaataccatcaattctgtattgaaacggttcacagtagaaaggaatagcacagattccaacaaaatcactagttacatctttagtaacagtaaacggatctttgacaattgccttgaatacatagttaggatcagcagtaaatctaagatattgatatttcatccgcccatcaggatcagtcggagcagataaccaatcagttacagaacgttcccaatcaaaccaaccacgttcaggtggtcgtaaaatttcaagattaaaggtttcagtcacattttgatagctttggttattttgtaagaaatcaccatttctaccttttatatgtgtaggatcaatgtcaggtgttggatgaatcaagtcccatggcttttgaacgaccataccaaagtctgttgaagcatggtcttgaaaaacaagcttcacattatcatctaaatcttgcacttaatccccttctttctttaatcatgtcttgtctacgatcttgcttgtagaacggctcaactaactcccacagcttgcgaccttcaggagtttcaagtgtgatatgaatatcgcgactttgagcgctcattttttgcaaaactaaaagtatggcttttaataagtcatgctcatctttttcatctttattagaaatacgttgttggttagcacttaaattgctgttagctgtaagaatacctacagctttaccaatcaattcccacgctctcgtggatttacttggaatcagtggaacagccatttcaggtcctgcttcaccaaaaatacttggcgaacttgcaataccaccgtttgcgtaccaattatgtgcttttctaaatcgaacagcattagtaaccgtaccataacggtcatgaatataatccatgatacccatcagttgggcaatagcattacctttagcaccgtgtttagtgtagtaatgtaagttatatccttgcatctgccctaacccataagtgcctgaactagggttgacaatgtgtggattccaaccagattcagcagaaacaatgtaattaatatctgcccaatctctttcaggaatatgagcttgtttcatccagtgagcatgatcaccagtaggcttaccagcaactgcaccttcattttcggataaatgatcactaatccaattaagtgctttaccacctaattcacgtttggccaaagctaacaaactaggcttaatcttaggttgatgcttagcttgatcgtgaagacctttaacacggtagtaaccatagcccatagacattgcatcagaaattctactgatacgtgcataaggtggggtttcattaaacattgtgcctttgcttggattgttgataataccaacgtgaccagctgcaccagtaccatgaccaaaaatgaccaaatcaccaggctctgttttagataagtttttacctaaatactgaacacctgatgattcctgcatagcaacagtagtacgaccaatgttaattccaaaatgtctaagtgcctgcattaccatacctgaacagtcagataaggtccttgacgcagcacccatttgatacttaacacggtcaaaagtatccttggcatattgcaagaacttagcacgtgaaccaccaccagagccaatggctttattgataaccgtccacatggcttgagaccatggattaccaaagtaagtaccagaacgtttactcaaatcagtagaatctttagttaaattagaaccaacatcatcaagattattggtaaacattgatttaaagctatcagcaaagtgctttaagctgttttctgctaactttctaagttctttcttgctaatgccagtaccatttgcaaagtgtggaagtgagagtgattgagtttgagtaccattaagaacaccccaaccttttctcaatagcatcctacgattattcccatgaggaataataatgtcattttgatcagttactacagcttcttgacgtggaccagattgagcatcattaacgactgctaaagtgtcatgagttaaacgaccatttgcatcagtacccttagcaaagtggactggattaataacagaactattaccaccaaattgctttaatacagcatcaataccacgaataccacggttgatttgtctgattgtgccacgcattgaatcagatgcataaccaaccattttatgcattgcaccgccaaaaccacgagcagtagcagtgcctaatttgattacaccatcgtgcaatctcttaacagattggtaagaccgtttataaagattactaaagtcttgttcagttgattttctgatcttatcagtagttttaccaacacttgaagtcattgacttgaaatctttaacagtcgctttagacatgctagagattttcttggtgaaattacctttgccttcgagtgacttaacagccttttcagcctgcctagaaatttgttcgccaaacttatcttttttagcagtcctagctaaaacattaagacgtttttcaacagtattaatgtttttgtgtaatgactttaattggctagtaccttttgtttttacactaacagtactctttttgcctttgatcttcttgattgccttagagagtgacttaacagatttaacacccttggtttttacagtaaccttatgagtgccacccttaatacgcttcatagccttttcaagggctttgatctgcttagatccttttaccttagcagttacagatatagatttactgcttaaacctttaagtgatgcaccagaagcgctgatacttggcacagaaacacgacttgaaccagatgaatatgaacgtcttgatatggacgttgatcttcttctagttgatttacgtttcttggtcttacgttttttagtcttctttgttttaggagcagtagtaagtttcttaaataaagcgtcactgatccacttggacttgccaattcgactattagcaccaagtaacaatccttcatccacaagcgtttcaccgtgatgaggattggtcttagcaacagctttacgttcttgactgatacgactagtaagcttatttagctgtgcaattaagcctttggtatttctaccacgctttagagcgtctctaatttctttagcgactttagctctatcagccttatcatattgttcatgcttaatcagacgcttacgctcattagcagtagcactatcatttttatcatgacgttctttttgcttttgatgacgcaaacggtcttcatcgtacttcttcttagtaagcttagttaatgtagtaagaatcttaacaggattcttagtttcaaggctataaagatcaacagtaccatttgcaaggtgaactgatcgaccaaacaacttagccatatcacgagcattaataacgtcttgccatggaaagatccaacgtggtacattcacaccctgttgaacttccacagaaccatcaggatttaaaattccttccttattattagtagctggtgaatcatgaccatcatttaagatagctggatagccatatttcttcttccaatcagtaccactagctaaatgaagtgatccaaccttaagttttccgtggaagaacttattgacgttattggcagcacctttgatgttatcaatagcatgactaaaagtactttgaatgccttttaataaactcgaccagaagtttttaagagaattgccgaaactcttaaaaccactaaaaactttgcctagtccaccatgtgtggcggaattgagtttcctatataaatcagaagcattcttatgaataccattccaaattcctttagcagttcttgaaatattcttccagttagctgaccatcttcgtttctcaatagcaagttgttttttagcagtttgaccaacggtcttaaacaaatcaccgtgatttttctttaaacgtttgctaaatgaagcaaagtttttaatcgtttctttattggctttgctattagtctttatgtaagatttagcaaaacgagaaacagaccgcataatctgcttagtacctttagaactatgtttatagacattatcccaagctttcttaaagttcttggataatgaactcttgaagtggttaactgctttaccaactttacttaaaccactcttgatgtttttaccaacaccattagcccactttctgaacttaggattattcttgtaaagcagtgctggaatgcctaacaaaggtgaaactgcggtcaatgctaattctttagagtttttcttagcaaatgacttaccttttcttaatccttgaccaaacttcttaccaacatctgctccccacttacctacttttctaaaagtatcatgggttgaccagcctaaattttctaaactccagaatttcttaggcggtttattgcgctgccaacctttggtgaaattattgacagcttgaccaccccaacgtccagcatatttaccgataattgcaccaattggagcaagcattggaccaacaactggaatcatgctggttaatgtaccaccagcgacagcgccaacagcaccgccaatgtcttgacttctagcattagcactgtgacggtccttaacagcatttatcacttcaggtgttgcaactgcagcgcctgctaaagcaccagtagcaagacgcttacccatagagaacttagtagtagctttaattcctgctgaaatctttttgcctacttcttgaccaaacttttttgcaaaattaaagccagacttaattttgctccagctccatttgcctgcctttgctaaaacatttcctgtagctctaaaacccttagctattgcttttccagcttttgtacctaaatcgcttgctttaacccagcctttttcaatacctgtccaagctttgatgccagctttttctacagtagtccaagttttacttccaacttttctaaagcggctaaaagtcttggatagaacgccaccaaacttagcccaagctttttcacctttagtagctttttcagcaagctcaatacctttaaatcctgatcttaatgctttaactgacttgtaagcagtaacagcacctttaccaatagaaaaaagaccgccactgactttaccaatgcccttaattgctaccattgcaattatggcatcagatatagtcttaacagcagtcttatttttagctaaatcagcagtagcagtagcaagcgtatgtaatgcactacttgaatctttaccattacctttaccaatattttggataatagctgcaaagtctttccaaacagccttaccaacttccacacctagagaaacaacatttttagtgatagctacaatatcacctttatttttatctaagtagccaataacgtttgaaatcgctttacctagttggttagcaccgctcatgacttctttactggtcatgatgttctttaaagcttgaagtcctgaagtcttagcatcaaaaattggcttagtaaattcttgttccaacttttgacgtgctacagtcatagcctttaaagcaccagcttgactttgaccatagcctttaaaactttcatcagcatatttagatgacttagcaatccaagtttggaattgtttttgtgttacatcaccagttttaagcaatgctctaagtttgccctctgacatgccagcaccacgtgcaagtgtagccataaaagtaggtgcagctttggtaattctacttaaggaggaataagtaactttgccagtagagccaattctttgaagccctgctgacatttggtcaatctgttgaccagtcattttagagctatcacctacaccagctaaggctttagacatttgcatagcgcctttaaagccaatggttgaccagttaagcatgtgagcctgtaaatcggatgctgaatcaccagctaaattagtgttagactttaactcaccaatttgcttatccagggcttgaatctgtctagtgttcatgcccatgcctttgaatctaccattgatcttagcaatggctaaattcaagttcatgccctctgtataagcagatttaaggcttgatcctaaattagatacagcattgcttacagcattaccaagtgcagatcccataaacacttcacgcaatgttctatgagtttcttgactttttttgttaacactagaaattttagcttttaatctatcccatggtgtaggattgatttttctttgttcttcttcaagaccactaacagctaatctagctttgtttaatgaagtagctgtttcattaactctgatctgttgacgtttgtaagcttcactggtagcaccagcttcactagcaatacgttttaattcacgagattgaatttcatattgcttagttaaattattgattgaacttctataaccagaaattctagcttcattagctttataatgattgccttcagattccaaacgatcaacatacgattttgaaacagccgtagtggtttttaaagtcttttgagcttctgctaatcctgacttgtagtaagtgagagagtttttagccttatcctgttgcttagtcagtgattctaatctactagtagctttcaaagtttgagtagcattcttttgaagtgcagtactgatactttcataagcttttttgcccttatctgtagaagtatcaatttcttcttgctgtttctttaaagatttttgcttttcaactaagccatcaattaatctacgctgactttttacagcatcagataagcctttgtacttagcttcagccgcttcagtagtcttaccagcacttcttaaaacagcttcttgagctttccatgcactggtagtactagatacagcttgccttaattctcgtaacgtttttacaggctgatcaccgtttaatttaatatctgtaatcagtgcaccaactggtattcttcctgccatttatttacctcctttctgttttgtctaaacttgctgcaaagtcccaaagactcattggacgtttgtcctttggtcttgcactcattacttccacaagacggtaataatcagtgttttcataatcttctagggacatatgagcattaacaatcatttgttgttcttgataatcaaaatcttccagcatttcctcataggcatgtactggatcaggatcattaatcgttgtcgcttttggagtcgtctacttgtaagatttttccaattaaatcagtaacaaattcacttacatcttctggagcagaatcttcaatcttatctacttgtgcatctgataaatgcaaaatcttcttcaaaaacttttcttcttcatccaaaagattttcttgtgctgttaaaacatcaagaattgattggtcatcatcgtctttaaccttattaattgcaattgataattttgcaaaaaacttttgtgcctttaaacatgcacgtacgttttttacagttgtttcaacttcaaaagtagttaaatgaagctttttaccattgatttttactaacattgattgattttcctttcaaaaaaagaaaaagaacggctttcacaccgttcttaacaaaattatttatattaatttgccaccactacccaccctgctaattattagtgagtagttgatgatgaaggaatagtgtccttatgagtagcatcatcaggtcccttgtgagttggatcatcagcagttgaaccagttacagtacctgaaataatccaattaagcatcttgtcgaagtcgaatccatcttcatctgaatagaatttttcgtaaaccaaaccatctgatggacgtgcagcggcatttaaagtgaaggtatcgtgtaccaaagttgggttttcattatcagtacccatagttaaatcaccgccaggtttcaaattgccatatggcaacgcaaagtaaagatcaacgccaatgtttgagttatatgagtgagcaataacaccaccatatgccaatggggttgagtccttagccatgttcccaaagcctaacttgctgtccttttcaagacctacaattgcatcatagaaattgtgcggaatgtcgttagcaccaaaagtaccagtaatttgatatgcaccaaagtgttgttcagcttttgcgttagaaccatagacagcttgtgcagtacgacttaaaccagtgatgttagcttgagtagcacctttagatgattccaaatcaatcttaaatacaccatctttaccaatattagtggtcaaaccacctttggattcatcggtaactaacttaccgtccttgtcatatttgaaaacaagtaaatcatttaaaccttgaagttccatttttctctccttttaatttgaaagctaattgttggctcaccagaattagggtcatatgtgtgccctgtaaaactagctacgatttgccaaccattagctacgaaaaaagacatgagcgagtgttcaaattcgttcatgtttacttttgtgtttttactataaaaaacgtttatcgctaaacgttgtatctgttccgtgtattggttactacctgattctgtaaaatcaaaattcacttcactaacaagtatatccacagaatcacgtggagtacgctcactagtaccaactgcaaaactgtaggctttatgcaatttaggaagattagagctgtttagcaaatctactacctgttttgctacagtactcatttatctaaaatctctctgaatttttcagcattagcttttagtactgcttctgcagcttccttttctgcatgatctttaaaatgaaggttggatatttctttttgagacatatcacgtgtcccatcatttacaaaacgagcgaccattgcattatatttatcttcccagcctactgaagtatcaccagtattaccatcgttgacttcataacctgctttataagttatagcgtcacgcatgtgtttagacttacggccatgaccagctgaccgtgcatgtgcatagcttgtatgagacattggagtgttctttttaagcacttcagcgtaagtcttagccccttcaccagtgatagctgatttttgactagtagatagatcaacttttttagtgatcttatctagccaatcatttaggcctttatctaaatcaaccatcacggtctgtcacttttgtgagagttatgagatcgcctgcagttggattttgaaatggatcaagattgatgtcactcacttcatacaatttcccattgtattgagcatgagtaataccatcataatttctgcgatggtgaataacgacaataaaagattcatcgtgatgatgtccttgattttgaatcatttgagtagtagttaagccccatcgaccacataaagtagggctagttaatgctttaaattcattagtaggaagtccattatcatcttcactatcttctacagtaccaaaagtgatcctattactcagtcggtcccatgtctgtagttgtaccatcgtcattcaccacctttgtttcatcataggccccacggagttggcctataatctgcttagccgttgtacttgatacagcagatgtaggatgcaaaaaccaattagccgcaattgcattaactgctaacttatacagttcaaatactgattcagttttgtaaaaactttcatcagcatcttcaccaattgcgccttgaacataattttcagcacctttcaatgccgttttcatacgttcttcatcactagaatcaagcgcatcatcgtcaggtaagtaaccaagtgagcgtttaagcccatcatcaactgttaagtaagtggtcatcattgatcacctaatttctattagtgattagcagatccagcttgagtgccaccgttatcagatggaacttgaactgattgcataagcattggttgactctcaaccttgtcaaatgaaccagatacaattgcttcatcatcccaaatcttggtatcaaatctaagcaatgcacgaatagcagtttgattacgtctaaatgccttatcagcaatgttagaagtaagcaatgacatttgttgacggtcatacatgtgaataaattccttaaagttgccaaagtaaaatggatggctttgatacttgccaccaacagtagtgttgttaggaaggtatctgtcttcaaccacacgtacgttaatgtattgcataccatccatgttgaaggtggtttgttgagtacgtggatcaacgttcatggcacgtgaaccgtctgacatacgaaccttagctaaggtcaagaaaccagacttgttagttaacaaggtagcgccaccccataaagccatatccaattcacctaatgcatcaataatgtcatcaagcttagtgatagtagccttcttttgtgagttaggaagtaaaccaacaatctttgagttataggtaacaacattcttacgtgcaatgtgttggtttaaccatgcttcaatatttgcgtttgagtcattgattaaatcatttggagcaaagaatacatcaccataatcatgaatgttatagctaagctgcttaactgatgggtaatcgccttccttaatgtctttatcttgccacttgtagtctgaattattagttgaatcatcaggaatatcatccaattgatccattggagtaatttcagagaatggttcaatgtttctagtaccgtgctcagtaccaacattttcaatagttactaaatcacgcaagtcatcatattgacgcattaaagtgttaatttgagtttgttgatcatcaggaatagtcaaaccagcattaccatcagcagttgaacttgatgataagttttccatgtacttcattgggtttctaagcatatccttgaaacctgaagcaatgttctttgacttttcttcagtcttattttcaacaggtttattagcaggcttgttaaccttttgagcttctacagcatcgtcatagttttgcttagcaaaatcacgagcttgaacagctttgttgtaatcttcagccgccttcttcatatcttcagcagaaacagattcaggatcagcttcataattcttttgtaaagctaccttcttattaaagagatcagtaaccttattacctgcttcaatccaggcattttgtaattcttgtaaattcatacgttctcttctttctattgccacaataaaagagacaagtcttttttgacttgccccttatctgtatcttcttgtttattttcaatgggtttagagtcagcattggactttttatcatgaattaatgctttaatcttacgaattgcattgtcacttaaaacgggtactccgtaagcattcacaaccgctggtgcttgatcattctcaaacataatagaatcagcaaagcctttatctactgcttgtttagcattcatccaagtagtttcacacatcatacggtaaacttcttgcttatctaaacctgttcgcttgctataaagatcaacataagcttgatccatagaatctagcgattgcattgcactagcaaaatcatccacattgccttgaacaccaccactcactctatgaatcatcatttgagcagttggcgacatttcaactttgtcagccgctagtgcaatccatgaagcagcagaacaagcttgaccaactacttgagctgttacattacctgggtacttctttaaagcggtatacatttctgagcctgcatcaatgtagccaccaggtgaattaatctctaatgtaatatcttgaccattagcattgctcaaagcctcatttaattgattagggctagtcacttcatatcctagaaatgaataaatatcacctaaattattgggtacgattattcccttgaccggtactgttgtcatcgtcttcacctccttcatttgctggaattattggtttatcgggagttggcaaatcatcaggtaaataaccataatgttgcaaaacataccgtccttgattgcctgacaaaatacccttgcttgataaatcaccaatttcagatgcaaagttatcaccagttgcatcaatagctggtctaatgtcataagtaatttgactatttaatttattagacaattcaccttgaaccgcaccagcatagcgattaagagctttagcatattgcccaccaatttgagtaatattactttgctggtcgccttgaccattaaggtaagaatcaggcacgccatagacctttgcaatttgcttaccagtccaatctgcttgtgaaagtaacttagctacatcactttttacttcaagtggctggtaagtttccaaatcatctaagacaattggtccattatcagaactattaacctgacgcataaactcacgtgatctagctgattttttcttccaatcaagtaaaccaccgccttgaatacttaaaatcccaggtgcttccacagattgagagagagcatgtaatgttaaacgattacttgcatctttaatattcaattcattagctaaaccagtaagtggtgagacaccagtcttaccaccgttttttgataccaatctgatatgaattacatcactttgtggtacgttttcttttgcctgaatatcaggttcatcaaaattaatgttgtaggttaatcctgatccgtcctctaagagcatcacttgaacttgagaaggtcttaaaaactcccaatataaatcaacgccattgatatttctccatctgtaggcataagcattgccatctagcagcagctgtgcaaacatcccttgccaaaaggcaaaaccgttagtcaaattagaaggattatcaattagtgattgtgttctatctttatcagctttcatttttaccagtgctaaatcagctgataattgtgagatcaatgagaaaatatctgaattttttaaagcagtatctgcggaaacatactcactaacagataaatcattcttaaataaagtaagaaattcaggatcattcaagctgtagcctgatacattgcttttattcaaattaaaaacaggcattatttatcacctcctccctgaccatgtgggagtagatcaattaataagcctgttaaaagtaaagcaattcctagacctgcaaaacctgctattttattccataaaaaaagagctatgacaataaagccaaagcccaataaataaaggattacatctaagaatttccaaatatctttaaacagtgttttaattatcacccgtttcacctcctaatagaccagaatcaggattttcaaaccactttagcacctgctcttgtgtcattctttcaacttcatgtgacttatcattaatcaagccataattttcaaaattgtacatagcctgatacatggcatctatttcggcgtccacaacatcaattttcttggtagctttatccttatcaacttgaataccaattttatcttctttgattactgcattaagcaaagccatttcttcaattggatcatcaaaccgtgtaattttgccagttgcataagattcttgtaagaacttagttgggttagctaactcacttgtgcgttgcgctatgtcttgaattaaccaccctgtattggcatttaaactttctgtgatgttcttaacctgatagctgccaaaacggtcataaccgaaaaatacgacttctagcctatgtttttgaacaaaatcaagtatccaattgtagacttgttcaggattgatgatgcctttttcatggctagtgatggtgcagtaccctttcttttcaagttcacgataaggaagaccatcttgtttttcttttgcttcaatactccctgcagcttgccatggaataaatgaatgctgcatcatatgccatttgtgaacaccatcagcagtagtataaggaaatgcgaagccaacagctgtattatctgaaaacattgagtagtccaagcccatgtagactcttaagccgtcaatctcaaaactatcatcaacagcgttttcaacatctttaagatttaagtagcttgcggttgactgtttcaaccacagatttaagttcttgttctgaaatttgtggagcgtgttggtaagcatcccttgatcacgttgtttaatcagattttcagttctacgcttacgttctgaatgagataaaccaataagcggatttgatttttcccatgtttcaggcttgaaagtttcatcaaggttatcttgcgcccacaccagacagagagagttatcaccttcacggtcataatctttttccataacatgctgtaatgtaatttgttcctgatgaaatggactggtaggatcaggataagccgaactgatcttgataaattgatggtatggaattacttgtgcttgaccatctgtaatatctgtaattctgtcatatgtattcaacgcaccagtttcatcataaatagccaaaacgttgtgagttgaatcatatttatcagcttcataactgattttccataccttattgttagttctcttttcaatgatttggttagtttgtaaatcaagacctgattcttttgcgagggatgcaaaaggttcaatcttaattactgcttcaagcattttcttgatataaccaaacagctttgtagactgatcagatgtattagcagtaactaaaaagtctttgttggtgtaattcaaagtatcaatcaaaacagctttacacatctgaataccagctatttgtgtcttgccttgaccacgtcctactgaaatatgaatatcagtaaatcttttttcatcattttcgtctttccaaccgttaatcatagcaagaataaacttttgccaattcattaatggtagtggtttatgaaggtcaacatctggaacaattgacgcaaatttaagagtatttctaacttccttcatatcgtaatgatatggaaaatcaggttgaccttgacgctttaaatcttgaagatttctaaaacaagcaagcttagtaatataacctgcaatttgcttaccatccaaaacgtcaaaacagtatttaatggcatcgtcattatatttaagtctgatgtcattccaatcaattgattgataagcaccttccacatcatgagtttgagttagatcaattttcacttcttaaaccacttcctttgagtaaaataaaaagctaaatcacagatttttgtgatttagcctattaattattaacaaaacagccattttgttaataatgatgcaaatttttactgcatttaactagcaaatagcttttttataattttagaatgccgtctttttatataattagctacttctctaatctgattaattggattcaaaacatctaaatcctttcttacccattttccatgaccgtgcttaacgtaaatcatgcgaaaaactcctttaaacttgtaacagttgatttagcatcatcatttttaggtgtattcagttccatcatctgacttctggcttttgggcttaagcccagttctttacctatcgtgttcatctgctttagcgaatcagacataatctgataagctggatttttcttgtatccttgaaagttcttagctgccaccttcccatccacaggagagatgacggttttatagataggttgctgaataccatgttcttgaatatcgtcataagccatgcggtaggtgtcgtaggctgaacagtattgttgaagtaaatattcatcagctcgtaagattttgtcattcttatttagataagtggcaagctttggatacaggtatttgccgtaagttccaagccatttaggtgcttgattaggtacttttggctttgatagatcaactttgttcatgtttcagccccctttcaaaagctttcaaaattttgtttgtggcacaagcgaacggcactgatgcggctccctagacgttaaaaaacggggcgggggtctttttatttttgattcatgtataattacacttacaaaatttaaatctcttagaagcgaatttttagccatttacagcgtgatcatttttcaatctagccgccaagttagcaatcaattttacgtccgttattggcggattatctgttggcttaccatgcaaacccgtgccatagtattgctcttcaaagcgagttttccagtagtggcattcctgacagcatgtaacaagattttgtaagtctttcatgtgatctgggaacctttccactggcagtacgtggtcaattacgttaccttccttaacaatgcctaaagccttacagtaccggcatagactatagtcacgtttaagaactataagtcgcatgtctttccattgcttagaatgataaaacctattctgctctgctttaattggattgcgattgcgaactactttgttgtaatacctttgtctcgttgaattgttatatctatggaatcgataaaaattattacgtttttgcagttctgcttcatgctcaatatgctttttgcaataatgattcggcacataagcaacagcatgacagccgggaaaacggcaacgtctaattcgtggcatcaactcaccccttttggcaaaacaaaaagccgacctaagtcgactcatgtttgcacgctcgctatgtattcataaataatatgcggtaatgtttgattataggtcatcgcatgctatggaacagcatcaattgaattatgacagttaataaacacggctgttcctaaacatagtcacggatttgaaccgtgaccatgcgaagaaaaatctaagattgtttgtcgaatttcattcacttttcgacaatatcaattatgcactaatttccaccgatcgatctccgatgaaagtccgcacagtttccgacgaaagtccgattcatgcatacacacgaagatcaacaagattatcatcatccacatcacattgctgttgatagtagtcatatgcatcagcaaattcaagcagtgaatcaggcttgatacggttatagtactgtgacttttcataaggcaacatcctaataatttgttcttgatcatagcaataaacatagttatctattaatactgtcttatgtaattctgaacaactatagatacttttatatatagcttttattacttgttcaatagataaagcactaactatagatgtttcagcatagttgtgacccgtactatgacttggtgcccatgatagtttaggacttgataaatctattaaatcatgtccgcatcttcgtaataatctaggcaattgtttagatagaaatcgatcaacattgttagcagtagcagaataatttacttcagcaaataaattcaaaataaccaactccatataatagatatatagcaattcgtaatatgtctattatacttcataactaatagctatcgatataccgcttaattgctttagttgcaatcattggcattgattcattcagtctatcggcataatcttttaattcttcataagtatctgcgtcaattgttacttccatacaatcacctcttctattcatatccgtagccaactaaaccattctctacaatctttaatgcatcattagtatttcgtgcaattccatgaataacattgaatttcattagcattttatggaaagctatttgatcaggacgcggtttaccagtagcatttttcacttcaatgtaaaaagcttgatgatcccaatcacgccagccatgcaagtcaggatagccagacggcaagcctgtagtaaaaaatctaccatcaggcgttctaattttaccgacattagcacggaatatatgacaatgatgttgtgagacaactaattcaattttcttttgtatactatgttcactttccattgataaacccttccgtgttgaaaattgcgtctgattcattaggcaatttcatcagtaatttcatgtcatccatacttgcatgttttttctgtaagattaactgtgatgctttaagtgggtagaaatcgcctaaaaagtcatcaccccaaacaccattttttcgataaggaaaaaagtactcattagcgacttcatcataaagtaatgaatctggataaatttttcgtccattcttgtcatgaaaaatagcctttttattatttaacatagttgttgtcctccaggttatgaattctttttgcaagaattacaattgattcccacataaaattatcttgtgcagtagctttatgttgcacagcttcagttaattttttatttgcttgaacttcttccaataaagaatcaaataaatcattacttttatgaatttctttcataagatcgttgttagacttcatggttttataatctgaaaacaaattcagtacacttatcgtagggtaaagaattgcaaataatacaagcagtgcagttttcattacttgtcatccctaactagcattggcttattatccttgttttcttcaggaataagttcctgttgatcagcctcaagacttacttgaactccattgccatcaaaagcaatgtcttttaacttgtttaagttaatcttatgagtaagcaggtctgcatctaattgcaaaactactttattaccattaactttgaaattatttgttgttgcttgaaatttaattgtttttcctgtcatgtttattatctcctgttaactaagcattaaatatgtaaacgatatactggtccaaataaacataagtaaatctaatttttcatttttaaaacaaaaagaaattaagactattaaccagttcattaaaattaatgttaaattgaaatattgttttgctgtcatttataaccaatcagttacttcatattttgcattctcatccaattttcgcccacaattgggacaatacttaataggataaggcaagcctttaatcgttaagtaccacttgtcatccatttcatttagattaacgtgaaatctattcatttttggcgcatataaatccggtccatcgtgaaaagcatttaatgtactgcaaagatagcagctacttgaaactgatgtcattcgtcttcaactcttttcattagttccttcggtggtcgattatatgtaacatgttcacattttgtacaaatataatagtcgctaaggctaaacagcgatgttttatatacataactgtgatgacaaaataattgcttaaaaaatagtttcactctgtaaaataaactaataatcatttatctaatctcctaccacacatagaacaaaatttgatttttttatcaagtttaaaggaaaagtcatcataataatcaataagaaccacttctagtgaattatcttttctgataaataattcacagccatctgtataaaaagttttcatcggatcctctgatccactttcaaaatgacaatatggacagatgctttttttgaaactgcattcatttttaattttcactttctagctttctcccacacataggacaatagttaatcttgctactctttgatacataagtaacttcgacatcacaagataaatttaattcatttccattaatataaacatctccattttcatatctatcaatacctgtgtacccatcttcgtatgtatcttcaattgaaataattgatttttcattattacagtaatcgcacataattattcctccgttaatcagtaatcacaatgtatgcattcactttttcagcgtggttataactattctttaagtccctagccgcttctttaggtgagtcaaataatccttcccaagtttttgcttcattgtcactactactgtgtatagttacaacaatacaacgatcttgttcataataactatcataaaaagtcgagattctaaacagattatattcatctggatcattatcccaacacattaaaatatcgccatacttgtaatcctcattagttttcttcgttcttttatcaattactttcattgccatactcctttatgtactcctgaggcaacataccatattcattaaagaactcaccacatagagcaagatctgatcttacacagtaatctgtagccattatgtgtctagcttcttcaagacccaatttaatatcacgtccgttttcatctttcattttcatgctcctttaatcaatagttatcgttagcaaactatatctagcaatgtccatatctccgcaataagggcaatgtttaatatcatcaatttcagcaataataaattctctgccgcaatgttcacaatggtattcagctaaattatgattgttcattttgatgttctttctttaaattgcgtccacaccagggacaattacctataaagattttgtcagtttcctgagaatagcactcaggatcaggatgagaaataattaaagctggatgatttttacaatcgatgtaagtaaacattattccgtcttcaccattcaccttattaatctcatctggatcaacatagtcatctctgtagtagtcgcgtcctagctttgtctttgggttgatttcacaatatttacacaaatttaaatattctttcctctcaagtgacttccacactgatgaagtgtagtgaattaactgataccgtcacaaaaaatatcagcggtgagtttttgtatagcattgctaattggtaaataccgatatgacatcttttgccaatttgtcacctatttttcttagcactcaatatagtagactgctaatcgtggtgggttggctaaaaatgtgaccagtttgtggtgagtttgtggtgggtcttacgcctacagcctgtagtgttgtggttagtgttactacttttttctttaaaaagtaaattataaaaaagaaaataaatataataatataggcttttaaactaaccacactaaccgaaacacgtcacacccctacagccccaacggtttgagctaccacatatactcaccacaaccaaccacaactaaccgcaactaatcacagccattaattccaatcaaaatgaagtggttctttctttaattggatgcctacatagcgagttccatttctttctttggttttaggcaatttcttagccatttctctaccaaatttagtcatagacatcaaatgttcattagattctctagcccaatcacgatatgcattgtataaaggtctacccatgatagtgtaattgctaccagctttacagcattcatcaagaaatgcttcaagtggatccatgctttcacggtattgcttggatgcatcttgaacaacttcagggtctttcaagccttctacttgccacatgattgcgccttgaacgatccaatttaagattccagtccattcagcttttaacttgttttccaaattcttatcaactttgttagctggaatttgtacattgaatggaacaaccttaattcttctccaaataccttcatcagttcctctaatgaatggcaagtggttagtagccatccaaatcttgaatttaggatcatattcaaattcttgaccatataaaaatctagctaggattctatctccaccagttaattgcttaactaacgattcatctaaacgtgaaccttcattagcttcagaactggtaactaaacgtgtattttcaagtcgtgcaatatcactattagcacttccacttgaattgtggacgatgattgactcaactgacatctgctttgcataactaccaagaatatttctgatagtattgataaatacagatttaccgtttctaccagtaccaagtagcaagaaaaatacttgttcagcagtcgatcctgtaattgagtagccaacagctttttggatataatgaatcaatttctcatcatgattgaaaatttgttctaggaagtctttccacataggacaatcaatattgtctgaatattctgatgcggtttgttcactaaacatctttttaatatcatgatctttcaattcaccgctagttaaatcaacataaccagattcagtgtttagaagcatgttgtcatgatcaaatacaccgtgatcaatagttacgtacttcttaaactcctcaatcatgtgtatttttgccatatgggaacgtgattctttaatgaacttattccattctttcattgctttatctttatcctgctgagtagcaaagctgaaatcaggattttcagttttaatcaaattaacaactttttcagctgctaactcaatatgccgtccattatctaattcccaatatgagccattatagaaataccaagttttatcagctgccatatatctgaatacatcaccgaactgatcatttaatctaagtcctcttcctgtatcatcccatgaacgagcaacagcccgttttttaggtttgttccagttaaagactagatctggctctttcccatcttgctcaggattataaatattaacggcttcactgattgctttatttaaaagggatattccataagtagtagcaccacgtttttcatcatatttatctctcattaaactggaattacgaaaaatcgtatccattttgtggaagtctctaccagtccaaaatgcaaggtcattagcaaatgccatatctgcttcagagtgagaattatagaattgttcccagccgcccttcatgaacatggtaaagcgagtaccagtcttagatttttctgcacgttggatgatgtcaggaatagataaatctagcgctgtaatttcaggttcttcaatcttatccggcactgatttatcagcaccaaataagaaattataaagagcttgcatcttttcttttgaaagagtgacaatcttaggaataccaatactgttcccagttagtgcaaagaaacgcccttgttggtacatctcataattgcctttacgtctgcgattgcctggaatctctcccttaaaaatacagtgaatacctgtaccagattggctgacttccatataagtttcatcagtcattaaacggaatttgtttatcagattgctaacagaactatcaccttgatgccaatctgctaaatcatctgaaatatgatcaatatcaagccctacatatccgttagtaaaatagaatgccaagccatcagcacgttcaatttcatctaatgcttttagtgctgtattaaaatctgaccatgtactaggatcattagatttaccagctctaccgttataaggatcaataggaatcttggtatttttattccgctcctttacccatttaagttgaaacaatccccattgctttaaacttcgcaattcttgagggatgttttcataggtaaattttcccatttacttcactccttagaatagaatatcattttcggataattcatctgttgaacctgtattacctttaaatggatcttctacagtttcttgctttttagcagcttgtggtgggaacttagtcttttgccatgaattagtgaaggtactattttgtttgcgagtttcacctttgtaagtattctcacctactgaaatgtagattctaatgaattttccttcacatgctttcatcaaatcttcttttgacttgatgtatttatcaatttgagcttgagttaaaccaattgcatctgcaatatttgccaaatctgctggatcatatgagcctgaatcttgaccggtttctttatccttagcagtccaaacatttgcaaagaagtggcgaccatgtgtttttgcattagtattagctaatgcagaaactttgtctaagtctttacgaactagaaaatcaaattgcatattttcatgaccgctagggcttgcatcaccatggacgcttacaatttgcatttcataagttccctttggaaatagttcacttctgttgtttgtcttttcgtttaaattaataaaacccataattaaataaatcctttccttttagccatgtgccaagcccaaccattcttataatgttttgcctttgcatacatggttaattctttaaaactggttagttcactaacctttttctttgctattagatcaatatggaatttttctgctttaatagctcttaattcttgatctttcttttgtttaatttttctaatttcaattgaaaaatcatgaccgcagatagggcatttcacacattctgctttaataactgcaaaacaatcaggacatgttttaatctgtaatccttcagtactaccgctatctttgcgtggatgtttctcacgatcttccaaagtccacttgtaatcagtatcaggcaaaccaaacctttcaaagttaccaacttgatcaataatgattgcgtgtttgttaggttgatacctcatggctctcattgattgctgtaaataaactacaaggctctctgttggtctgagtaaaacgacacatgaacagtccggcacattaaagccctcagacacaagatctacgttacagaggatttttatttgtccttgcttaaaactatccatgattttatttctctcgttagagggtgttttagcgtccgcatggagggcattaattccagcgtttctaaattcttgtgccacaatcttgctgaagctcgttgagtgacaataaattattgttttacgatctttagcgaacttaagccaagatttaacaatatctccatgaataatgcttttagtaaagtcgtccatcgacttgctggtataatcgccagtactagattttttaagcaagtttttatcgcctagttgatagccatatacagtaaatggtgctaatttatgatgctcaattagccatttagttgttgggccttcaaccatcgctgaatagatatctttaaatcctttgccggataatcgccaaggacttccagtaaaaccaagtctagggacatcattatagtaaccaaagattttcaaataagttttagctcttgagtgctgtgactcatctacaattattaaattaggttttggaagtatttgtaatctgttagctactttgccaacggtcataattgtgcaatgatttaaatcaacgccttgctgcttgaaagaatctttgatctgctttactagttcttggcgatggacaaagaataatacatgttcacctttttttactgttaatctagcaatttcactgattactactgacttacctgatcctggagggctaacaattaaaacgccttgatttccagctgctagagcatttctagccttattaactaagtcttgctgataattaaatagttgaaacattaatcatcatcttttagatcatgaatatttttcatcgttttgatgatctcattggcatttctggcatgatcattttcttgatcgatttctcgttgaatgtttctgacaagaccagctagcacgataccatgcccatgatgtatttgaatttggctgccatcatcgtttaaaccgacaataatgaaatgtttagttctgccgttaagaatatccatgcacgttgcacttactttgtcttccatttccttatctaacttcaactttttatttacattttcactaaacattattttttctccttaactttatctactgctttgtctaaatctgatttttgaaacttaaataaatcttcgactttgcagcctctacgctggtcaagcctattttttgcatatgtcccttcatcgccatcaagaattacaccgcgagttccatcatcaggtttcttaatcattcgtcctactacatcggataggcccattaaaacattccgaactgaatctcttagttccggcccatattgattgaattgctggccggaagctgtggttattggatgctctgtttcccatgctgtgatatatacgtttagtggcatgtcataaatccattcgataaatctcaagaagtaattagtccattgagaatagtgttgtaattcattgctaattccattttttgattctcggcctttttcttgaaaccaaattttttcgaaattggaaatatcatctaaaactaaattatcgtatttagttggatcgaatgactctaaccatttgtttagatcttcaattggtttcttagcgtcaatttgccatgccccagctaaatgacctgctaaaactttaaaggacttatcaaaacctaatacataagttttacctggaatgaatttagcagtagatgttttgccaattccttgttttccataaataagcacacgccagtttttcaacttatccaatgtttgaatatttatttcaggcattcattgatacctctttttctaacttttgccatttatatccacctgcataatttctttttcctcttaccacagcggagatatttccttgactaattccagtaatttttgaagcttggtttgcacttgaataggctgcaattctgtggctgtctgaagataactgaataataggagtactaacagcttgaataaatttttgagttctatgaccgtaatttaagttgtgagaatgtgaacaccattctaaatttgaaacatgattatcatctcttatttcatttaaatgatttatttcttggtatccatgaggattatttaaaaatgcttgagcaactaatctgtgaactttgaatatttttcctttaccatttttagaaagtctgaccattaaatagcctttttcgttaggtacttgcttcatcatctttccatagatggttatgtgagaattgccatgcttaacttttctagtcagactacgaatccttccaaaatttgaaacttcgtaaagtgattcaaagtgtttaattggcttccaaacttcttctttccaactaaatgctggcattattcttcacctgcatcgcgaatcaaatttttaatgccctgaagctgattaaggacattgctagtaattgctttttcatatgcttggatcattactttcttgaatgcttcccactcatcagtatttttaattgcttgaaaagcttgtcttgcttcggatgaattaaattctgcattttcccatctagcagcaaactttaacttcgcttcttgcttaatgctatcttttaaccaatcttgatcaatcatcgttatctacctctttatctaaaccttcattacggaccttaattactgcttcttcataaattgatcgaaccacatttgctacaacctcacttgggctagcagtaaatttacctggcaaatctggtttatttttattcagccaacgcattgcgccagagtaagttttgtcattctttttagattgatagactaaataaattacccaatcgtctgcatcatcttgcatttttttaatccaatcttgaaagtctttaagatccttatcttccatagtcagccatctccattccgtcaaaatagtcttctaggaagctggttaattcttcacgattatcacagttttcaaataagtactgatacatatcctttgcatctgtgaattgacctttaaccatgaatttatcagcgtcatcagctaactgttcttcaataaaatcaagtggtgttctgtactcacaattctgaccaattgcatgaactgtattccctacaactaccgttaagcaatcccaaccagcataaaaatcacgctgtttttcaatcttttggtagttgagttctttagctaattcttttccttgttttgcttccatgatggttttctccctgtttcgtactgactagtaactacatcagtaattgcccaaattcgttgttgtgtttctttgctaagttccatgagttaacctccaataatttgaaatgctgcatcccaaaagccatagcacaaaagagtgaacgttaagatcacgactgctattaagatgccaccaaagatagtttcataatggctttctttatgttggattggtttattaaactcacggtaataattcttatttagcatcccaatcaatttcctttctatgttcattcatccaaatagcagctggatattcaaagattgtcatcttaccgcctctgcctggatgaatattgctacaccaatccggttgaaatggataaagaatatttctttttacccatgcttgtccgtgtggcttagcgtatttcttagcaaattcatcaatactgattgttcttccttgcagttgctcttcagggacatagccacgttctttcataatttgatcaactgctttttgaagttcagtgtcattaatgactagttgcattgtcatcacctggcctatacttctaacaagttcatttgttctgcaacgggatgaatatcatctttagctaatagatcataaatgaatttcttgcctttttgagtccatttaagattgttgtgaactccatgttgaccattatttttttgataatcatatggttcatattgcgtataacctttgtcagcatatttttgatataaaacccaatgtttaccttgtttgaaaataatgtgacgtttattcaactctttatttaaagttttggctgaccaaccataatctttcgcaatttcggtagttgtcataagaccagggtttctcatttgggagtcgaaataatcaacctttggtttctgttttgctaattgctctgcctgatctgctgctaaacgcaaagcttcaggcaatgttttaggaatattgaatttacttggaatttcaatctgttgtttcatttgattaaacaaactcacatattgagcagtaaattgatttccttttttaccagtcatcttatttgctacgaactcgcatccctgtttagtgagcagataattaggtaatacttttccttgcttactggtataagtgcttggaataaagaactgacgtgagctcaaatttgagctctcctctatatctttgatgtaagtacgaatatcacgcattaagttcttgtgttctttaccaatcatttttgcgacatctcggctgtctaaaactgactgaccttcaaaatctaagagtttcataattacttttcctccttatcttctctagctaacttaaatagaaattgtgttgttactcctaagtagtcagcaacatcttgtaatgaatcagctctgggcatacttctatcccatttgctgatcattccgttggacatcttcaagtcatgttcaatctgataaattgacttgtgtttttcctttgcaatgtctttaatcactgaataaagtgacatattagactcctttcttagattttatattgatttataatagaatttattctattatatgagtataagaaataagccaaatcgtaagacctatgcttacaaaaggcggttcaaaagattttttgctatgtttcctttgaacagtttttattataatagcccgttttctaaattgcaagcatttattttagattttgttctatttcttatgtcgtgtcaaaataaaggagtataaaatgagtgcgaaagacaatgtaatgaggctttggaaagaaagaagacctgatataaaatcagtagctgaattagaaagaaaaatggatttaagtaacggaatcatcagcaaatgggaaacgaaaaagccttcaacggctagtgcacaaaaggttgctgatttttttaaagtaccattaagtgaagtcttagatgatgttacagatgaatctgtaacgctgaacaaaaatgatcaagaacttttagcaatgtttagaaaagaaaccgatggaatgtcaaatgaagaaaaacaagattttcaagattctttaggtattttgatgaacactgcaaagcaaattgttaaaagacgtagaaagagtgaaaaataatatgcctggatacgaatatagattaataccagaagattcatatgaaagtagcaatgatattgctaattctatagttgaagatactgctttaaaatacaatgtacctaaatcagaggtaaggtatccaatggttattaactatctttattcgataatcgggacatgcgatatatgtgcttatacacctaatttaattttcccttttgaaaataatggtcaaaatgctttaaatgattttaattatggattaactgctagaaatatttcatttacagcgcaatctattgatgaagtaagtactacttttgcaaatagagtctgcggctttaccctttttcccgctagtggaccaattatgtttttaaatgcaagtattaatacttggggaagaataatatttactattattcatgagctttcacatgcttatcaagcattagacgaccccacatataaaagttctgttgctttaataaatgcgcaaaagagccaaggaaatccttatcctgaagagcttcagcccattgaaacagaagctaatataattgcttcaaatgtttatgttccagaagattcattaaaaaaagaaattatgaataaatcatttaatcaaatgaaagacatttatggaatgagctcagcagcattacataacagacttaaaaactttttgcattatactattggaatgtcaattaatgctgctttggaatatacattagcatttagaaataataacacgataaaaatggatatttgtcgaagctattgtattcaaagtctgcataaccctgttgtgttttaaaacgtccacagtgacgttaaacctgaaagaaataaggagccaaaacaaatgactgataaaaaagaagacaataaagatggttctgttggttgtgcaataggatttattataataattgcggttttagtgggagggttcttatggataagacattctaatgagcaaagcaccgcaaatattgagagacaagaaagaattgaaagtcaaaaggctaaaaaaagcaatgcaattaaaaagcagaaagctaaccaaactaatgctttaattgttaaaaacattaaggctttccgttctaaaaatgatccagatactaattggtcaaaatatgtaagcaaagttactgttaattccaaagctaacttatctgtggaagttaatgatcgttttgttaatttatctgacaaggataagactacttgcatgcgtggtattaacaaagaagctacatgggatgcttatcattatggcttaattagtaagtctaaagttggcaatcgtttatgggcacaaatatttgacgatgacaataatgaaatgggacgttccacatttgatgtttatgataactataagtggaattaatctataaaacaaaaaagcccacctactgctggaacagtaagtgagcgcaactcaataaacttaataatacttataatgtaatagagtaacgataaaccgactggaatcggcttatttcgtctaccctattttagcaaaaataggagtaaaaataaaatggcatcaataagaaaacgtggcaaaacctggtatgtaagattttcaaagagagaaactcaatgggatccagaaaaacaaaagaatgtttctattttaaaacaaaaatcaaaaggcggtttcaaaaccaagtctgaagcacaacagtacggaattaaaatggaagccgcttctattgatggtgtagatgtagttaagaaccctgtgttcgctgactattttgaacactggtatcttacttttaaattcccgattatcagaaaatcaacgcaaaagagatatattaccaattatcattatcttgaaaaatattttggatcaacaaaaataaaagatatttcaagagctaaatatcaaagcttcttaaattggcttggtaaaaaccatgctcctgctacagttcgtaaaaccaatattatggttaaagcttgtgcaggaaatgcaatagaggatggtttaatcgttaagaattttaccaatcgcacaaccatcacaggaaatcaagacaatgtcagagccatagaataccttaatgaaggagaaatgaataagctggtacaattatgcttaacaaatttaactcctcgttatactagcaaatatttagttctagcggggttatttacaggcgcacgacttggagaactaacagctttaaaatggactgatattgattttaagaataaaattattgatattaataaaacctggaatcctaatttaaaaatactagaaactgtcaaatcttttgtgtaaatagttctttctcgcaaattgattttttaattatttattcaaaataagattctaaggtatcctgaacctgaccaaagcctttatgaattcggttgaaatagcggtcattgtagctcattgcctggatgccaataaatgcatcaagcgactgttcagttggaaattctgccttaggcttagctttacgcttgatgacgttgttaaaggattcaatcatattggttgaataaattgaagctctgatttgtttgggataattgtagaagaccagcagatcgggctcaatttccttcaaacctttgatgacattgctataagctttattccatctggcatagaatttgtgcaagacagctgcagcttcttttttgcttgtctgttgatgtatctgcttgaattcgttcatgatcttttcgcggtcatccacccggactttagcacagatattgcgcatgacatgaaccaggcagcgttgaaaatgagctttaggataagtcctggccaaggctgttttcatgccaacaacaccatcagaaagaaagagttcaacttgcttcaagcctctggacttcatgttttgaagcatctctgtccagacttcaatgttctcactaggagcaatgcagtagtcaatgacttccttatgtccattaggtttaatgccaatggcaatatatactgcttcacgctcaaacgtttctcggcgcaaaggaaggtatgtcgcatccaaatagacacagaaaaacttgtcgcttagcttgcgcttgtgataagcctcaaccttggggagcatctgcttggaaatatttgatacttgagctggactataatgactgccatacattttctcaatcaagtcagcgatttctctggtagttacgcctttggagtagagcttgataatcgtgctttccaaaacatcagagtgctgcttgtagtcaggcagcgtgtgctgatgaaactgaccgttgcggtctcgaggcacttgcacttcaattggtccaaactgggtatcaaccttgcggaaataagcaccatttctagaattgccagtattccagccatttctggcatagggatcatagcctagaaaggcagtcaactcagcttctagcaagttattaacagcctgttgtagctctttgcgcaataaatcatttattttgtctggattgaatagagcttgagcaaaatctttggtaaaatcattcatgaaggagttcttctttctgtatgtgtttttttgttcaaaccaatcatacaagaaaggaactcctttttctaatgtttaaagaaataaatttaaggaatcattcatccttacacaaactattttacagtctcaaatactaggaccaactaaaaccgaaagttcagttcgaaagattaaagttaattctttcttattagataaattgaaacaattaaaaattaataattctgaatttatttttgctattcctagaactggattaccaccttctagttctgctgtaaatcaattcttaagaaaagccattaaggaaattggacttaacaaacctgattttcacttccatagtttaaggcatacccatgtttcatacttaatttctcaaggaattgatatagctgctatcagtaaacgcttaggacatgctaatatagcaatcactttatcaatctatgctcacttacttgatgaatataaggatcaacaagatgccaaaattattaattcactcaatcaagtttgtgcaacatttgtgcaacaccgtgaaaaattctatgatattgcaaaacattaaatcctataatatcaacgatttaaagcttataaatatttctaaaaacctatattttaattcaaccaaggctttaaagtctggtaaagttactcgtgcctaatagaccaagagcttgttagatcactgatcttgcaagcttatttttttacttattttaatgatttatataaaaaacggtaagaagaccattttattttgtcttcttaccgttttactttacttcataatattgtgatgcttatcgtcatcaggaatttcgtcggccattctttcatcaattggcgtgtatgcatactcagtaatcatttcacccaccttagttggcaagtccaaatcttgataagttacatttctagctaagccattgatagtagctacttccttcttcttctttttatcaaaaatgtgaacgtggttcttgtacatgtagtcttctacattttattttgcacggtcaagtcttgcttcgtagcgaccgttttcgaaaccagcaatatctttttcaaagtcaatatatttcatttgaattcccttgtttcttttctatagttctattttaacctataaatcatgaaaacgattaatatctttagaataaattgctgcaatcataccattttgcaagctaatcctgaattcattactattaggcaaaaattcatttgatgaaaaaacacgaggatagttcccagaatagtgcttcaactcatatcttgcaccaataatattaaaatcttcgattgcttttaaagctgcaaaaccaatataagaataattttttcttttttgaacaacatgcgtgcctgcattaaaaaagcaaattagattttgttggtcaatcaacgttacttttttcgcatataatctcatttcaggatttagcaacattaatagattgatcaaaaaatgatccaatcttccacctgtagcaccaaaaatcactaattcatccacatgataatcttcaaaagcaatctgcaacattagctcagaatcagtccaatccttgacaggattagaataacgaatgtcttgaacattactttctatttggcttaagtcattttcgtgtaaagaatcaaagtcacctactgccacatcaggtattattcccagttcttctaaaaacaaggcaccacgatcaaccccaataactaaatcagcttgagccagcttttcttcaatatcttcaggccacaattcagttggaccgcccaacaatgcatatgctttcattacttaataatcttttctaatttatgtacttgactgccaacatcaccattttcatacaagtatgaaccaacaacaaatatattagcgccagcattttcagctaatttaatagtctgatcattaataccgccgtcgacctcaatatcaaaatcagagccgacaatctctctaactgacttaattcgattaactgattcaggaagaaaactctgtccaccaaatcccggcttgaccgtcattactaatacttgtttcagtaatggcaaatacggttcaaccacttcaactggtgtatctggactaattgccaaagcagcatcaacgccattagaagctaaataatcgaaccaataatataacttaggcttgtccattgcttcatagtgtagttcgaccaaatctgctcctgcactaacaaaagctggtaccaacttatctggggcatcactcattaagtgaatttcagcatctgtcatcggaaattcacgcttgaaatctttgattagttgcggtccaaaagataaattaggcacaaaatgtccatccataatatcaatatgaaaacggctaattccggcctggactgcattttcaatatcatttttaagatcaatattatttgcgttcaaaattgagggtgcaatcatcatcagctattacctctattttaaatattccggtatgcgaccttcgctaatctcagtccgcatagccaaataatcctcatatctactttccagaatttctctggcttcaagtaacttctttacttcacagcctggctcctgcaaatgctgacatccgcggaacttacagtgaatacttgcctttttaaactcaacaaagtaattacataactcattcaacttgattggtgtcaaatcaattgacgaaaaacctggcgtatctgctaaaaagcccgcgcctaacttaaaaagttcgacctttctagtagtatgtttcccacgattcaagctagttgatatcgcaccagtcgcttgattagcatctttttttaaatggttaagcaaagttgacttaccagcacctgactgtcctgctaaagtccaaatttgatttttttcgatcattttaggaatctgaatttgcatttcatgataatcagtgaaaacaagataacctattttttgataatatgctaaagcttgcttgattgtgtttaactttgcttctgatagcaaatctgctttagacaagtaaattgttacaccaactttttgccaagaaaagaaagtcaaaaaacgatctaacagctctacagaaaaatccggttctactgcagaaattactaacaaaacatgacttacattagcaactgctggtcgcccaattcgattaatccgcggcaagattttcaccagatagctcattcctttatcatctatctgaatttccacatgatcgccaactgccggtttttgctttttttgacgaaaaacgccgcgagcacgcgttctcacgatacccgcagcggtttctacatcataataaccagcaatcaaaccaacgacggttccttgcgctagtttcatttatttagtcaccttttcattcaaaactgtatcgccattgcgaacaacctttaattgtccactaccttctctaatgttaaatggaatcgagaaactcatatcatgcttaatatacaagtcacgataaatattgttcaaggaatgatcatcatccttaatatagatctggacatgatcacccttgccattaacggattctgactcagagttattgcttcctttatcattatcaggcttctcactcttagaaagatcatcaccaacatagttaacggtaaaggtcttagttacagtagtttccttgtcttcctttggacctttcgagatcttgatggtaacagttgaaccacgctcaaccttagtacccggacctggctccatcgaaattactaagcccttctcaacatcatcagaatattcttgattgatttgtaaagtcaggccatgttctttggcatagtcttgagcactcttcaaagaataattacttaagtctttcaaggtaaccatatttgaatgtgatctagcctgcttgccacgtgaaactatcaacgtaattgtagtctgcgtcggcttaacctctacacctgcagcaatgctttgagaaataacttgattttcgtcaactttattagaatattggtcctctctaactacattaaagcccatattttctaatttttctgccgcttcggcatagttcttcccaaccatatcaggaactttaaccatgctagaaccgctggaaacaattaaatcaacgctctttccccgctctagactattgcctgcagttggttttgtcgcaataacccggcctttttttatatcatctgattgtcgcctaataatttttccaacctgtaagcctgctgcttcaagtttactctcagctgctttttctgcaatattagttacatcaggaatattaacatcctgtcgtttatttccagtaccacttaaagcgaaaatcatcataaaaatgattaaacccgcggcaataattgagatcagccaccaccatttgtgacttttgacattctgtaaaaaagtctttttctttactagcttgcttgattctactgattcggtttttgctggctccaccacttctttttcttccttttgtggcttaaatccaggcaatacaattgttttatcatcgttattaccatgatatggtacaaaaaccggttcatctgcccgttcaggatccaagctactatccaaatctgctttcatttcctgagctgtagcatatctatctcgtggatctttcgcggttgcctttaaaacaacattttccagcgcctgtggtacacttgaatctttcttgcgaattgaaggaattggttcttgcgcatgcttcagtgcaattgccactggtgtatcaccgttaaacggaacagttcctgtgatcaattcatataaaattattcccaaggaatagatgtcagattgtttagtaaccattccgccacgcgtttgctcaggagacatataatgaactgaacccattactgaattagtttgtgtaatcgagctttgattcaaagcaacggcaattccgaaatcagctattttaatattgccgcgcttatccatcaaaatattctgtggttttagatcacgatgaataacattgtgcttatgagctaatgcaactgcactcaatatctgatccataattcgaataatttcatttaaatccaaaggtgaatttttttgaatatattcttttagattaggaccatcaacatactccattaccatgtatggcaaaccatgatcggtacctacatcaagtacagaaacaatattaggatgacttaattcacttgtagctaatgcctctctttgaaaacgagcttgggtttgcggttcattctgcaaatcaaggcgtaaaattttaactgccaccttacgttgcaggataatatcttccgctagatagacattggccattccgccttcacctaaggtatcgatgatgcggtaacgttccccaagcagataacctttatcgatcactgctctcgtcctccttgttccaaattaagcagacagtaatattatcaccaccacctaatcgattggcctcactaatcaatttattacaacgttctcttaagctaagctccttagttgccaaaatttgttggatttgtggatcgctaagtgaattggttaggccatcagtacagagcaaaataatgtcgttttcccccatcttgatctcatcaaattcaggatcaatcgtacttgagacgcctaatgcttgcgtaataatatttttctggggatggtgtttagcttgttctttagtaatctgacccatcttaactaattcgttaaccaaagaatgatcttcagttaattggacaaatttaccttcagaataactataagcccgagaatcacctaaatgagcaattaaggcatttttatcaaatgcaaacgccaatacaatcgttgtccccattccatttaagtcaggaaacttatcagcagtctttaaaattgtttcattttcagaatttaattgcacatcaagccatttatgagcgagattagcatctgcaaagtcagtcatactaaaattatgtcctaaatgggtgactgccattgttgaagcaacgtcaccaccttgatggccgcccataccatcacagacaattgctaagacaattcccttttgatttttaaaaacttttacaaaatcttgattgcttttccgtaccttaccaatactcgaagcgtatgctgtttcaatcaaaaatctaacctcgtaacttaaatttagcaatgaaaaatccatcattgccatctagatcaggcattattttcaacatccctgtctttgattcaagtttagttaacttaaatggaactagttcaaagtcaggatgtgcttgcaaaaacttcttaactacctcttcattttcttccattgaaattgagcaagttgaataaaccaactcgccattcttttttaagagtgaacttactgcagttaagattgccaattgaattttttgtaaattttgtaagtcctgttgtctcttagtatagcgaatttcaggcttacgacgcaataatccaagcccagaacaaggggcatcgactaaaatttttgtaaattcacctgccgcaaaaatctctgtagccttacgtgcatcacatgccttagtctttaccttatttgcaacgtgcattctctgggcattatctcgtactaaacgtaattttttatcatgaatatctaaggcagtcacatcaccattaacaatgctttcggcaatttgcacggttttcccaccgggagcagaacaagcatcaagcacatgctcatcttgttcaaagtcaaaagcttctacgactaaactggcagcttcatcttgaattgttaacttgccttcttcaaacaaatcactttcgctaatgccaccgtgactcaaaatcacatcatcgcttgataacttagaccattgtggttgatagttatcccgctctaactgggcaaaaacttgctctttatctgccaactttgaaatacgtacactgtttttagctggctcattaatactgtttaaaactgattttgccttgtctaggccccagttatcaattaaatattgaactaaccattcaggtacgctctctttgacacttaaatatttaactggattattttcagctggtaaaatcaccccgcgcctagtaaacgaacgcaaaatcccatttaccaaccgaaagccagctgaatgtcgcttgccatattgcttagcaagtttattagcctcatcaagtacagcacgatcaggcactttatccaaaaaaatcaactggtaaagtgacattaacaataatggcttaatatatttttcggtcagttttgtcctaactaagccttttaactgatattctaaaaacaatcgatactgaatcgtgccataaacaatattagtagctaaattttggtctgcaattgacaagttagagtgctttaagctgttattcaaactaatattagaataggagccttgatctaagaccttgatcaatgtctctaagctgactgcacgtgcactcttatcgatcgacaatttcttcacctgggacaaacttactaccttgaccatttaaaaagctcttgatgtccattctctttttgccacttggttgaacttcaagtaagttaagtactgaattatcagcaaaactaatggcaaaacgtcctttgttagcaacaacagagccggcatttaaacttgatgaatcagatgcaatttctgccttccagatcttgaaacgtttgccttcaatcatcaaataagcaccaggatctggattcaaagcacgaatcatatcgttggcctcttctgctgtcatatcaacattaagcttttcttgttctttagtgatgttaggtgaaaagacgaccttttctggatcctgtggaacctttttaattgagccatcaataattgctggtaaagtcttaagcaataagtcccgcccaacaattgataatttactaaataaagtgccagcgttatcatcaggctcaatcttaattgcttcttgagcataaatatcaccagcatccatcttcttaaccatttccataatggtaattccagtttctttatcaccgttaattagtgaatattgaattggtgcaccgccacggtatttaggcaaaagtgagccgtgaacattaactgccgcaattttaaccgaattcaaaaacttagttggtaaaaattgcccatatgctgcagttacaatcaaatctgcatgcatatcaattaatttctgcatttcgtctgatccagacaacttaaccggttgaaagattggcaaatcatgcttttctgctgcgatcttggctggtgacttagtaattttctgcttacgtcctacctttttatcaggttgagtgaccacggctttaatctcatagccttcatcaattaacccttcaagtactggaactgaaaatttcggtgttcccataaatattattgatgtcattaaagcatccccttacataattctctctggttcattatcaataaaaatacttaaaccatatttcttagcttcctgcgcggaatcttgaacatggtgtaataattcatttaaatttggttcttttttatattttaccagtatttgataataatatttattttttacacgagaaattgcacttggcgttggtcccaaaataatcgttggctcatgcaagtgctcattcaaatacctcttaatcctaaaagcctcacgagctgcattctgttcttttttagcagcaatggaaatcagcacggtataaaaatatggtggatagttaccagcatgccgcatattcatctcatagccataaaatcgttcgtagtcctgagtttgagctagttgaatagcataatgctctggattataagtttgaattaagacttccccttccttatcagcacgacctgcacggccagctacttgagttaataattcaaaagtcttttcagaagcattatagtcagaaagccataatcctgtatcggcattgattactccaactaaagttacattagggaaatctaatcctttagcaatcatttgcgtacctaacaaaatatcagcttcatgagcaccaaaggcatctagaattttcttatagctaccctttcttctagttgtatcaacgtccatccgcaagattcgtgcaccaggcagaagctcttctaattcttcttgtaccttctgtgtacctgcacctaaaaaacgaatttgcgagctttggcaattaggacaacgtgtgggtactggctcagtatgaccacaatagtgacattgcatactgttagtatccttatgcaaatttaaagaaacatcacaattaggacattttaatacaaaaccacattcacggcaaagcataaaattagcaaaaccacgtcgattgagcattaaaataacctgctctttttttgccaaacgcttttttattgcatctactagctcaacagataaatcaaattgaccaccagcaaactgcacgtgctttagatcaatcaaattaactttaggcaatttcttttgattagccctttcagttaaccgtaaaagatgatagacatttttttgggcgcgtgcacggctactcaacgatggtgttgcacttcctaaaaccaacggacaattatgaaatttactacgccaaatagccacatcacgtgcattataacgtggatcggtttcttgcttatatgaagactcatgttcctcatcgatcacgattaaaccaatattatctagtggagcaaaaactgcactccgagcgccaacgaccaccttagtctcgccacgacgaattcggcgccactcatcatatttttctccctcagatagggcactatgtaaaacggctacctcttgaccaaaacgtgccttaacctgacgaaccatttgcggcgtcaaggaaatttctggcaccagcattaatgcatttcgcccctgtttaagagccttgctaatagcgtgtaaatacacttcagtcttcccgctaccagtaatcccttccaacaaaaaagtctcagcctggcgctgttcaattgcttgggtgatctggttcaaagcaccttgctgctcaccatttaaggtaaccgctgttttatgttctccgtcatcaaatccggataacggatcgcgataaacctcaacactttttttattcaaccaacctttggtaatcgcagaattcaaactcgccgccgtcaatccaagctgtttttctagctggctttggcttttgggataatccgctgcattatcaatgatatccatcaataactttttttgctttaccgcattttgacgtaaagtattgtaaattttgggatattcctctttttttaatgctagttcatattgattttcttttttcttcttggctcgattttctaccacatactcaatctttgcttgatcatcttgcaataatttgcggaattgcttaatctccgccagatccgtaattttatttaaatcaattggatcaccctgaaacagcggcattttggcagctctatcattagctggcactagcaatttgcgataatttgctcgcattacccaaggtagcatcgcttgtaaaattttaattcggtaagaaaaaatattttttgctaaatcagcagataactttaccaactctggcgtaagcggtggcatctcatctaccacaactagcaaatccttaagtttacctttaaattcactttgatcagtgatccccaccacaaaaccttgcactttacgaggaccaaacggaacaactactcttgatccaatcgcaatatccttttctaattctgttggaatatgatattcaaaaatacggtctgtttgccgtgcagctacatcaacaataacctgagcaatcatttaatcacctgtaaaaaagaccttcaccccaaaggatgaaggtcaataaattaatcttcgaggttaacctcggcatgagctgggtcaacagtaactttaccagcagcaatttcttcaagtgccttaccaacagccttatcacacttaaaatgttccaaagttggtggatcaccagcttcaagttcatgtgctctcttagcggcaagaacagataatgaatagcgtgaatcaacacgtgacaataatttatcaattgatgggtaagtaattctcataataattaatcctccttgaccatcttacgatagtcatcaattacacgtttaacactgacatgttctgcatcgacgatcgctttaatatgatcaactgcattagctactgtatcattaactactgcataatcatagtcttccatctccaaaatttcattgcgcgcttgcttaattcgaccacgaattacatcttctgactcggtgccacggtgttccaaacgcaaatgtaacgtatgtagatctggtggggttaaaaagataaacacgccatcgggcatcttttcacgtactttttgtgccccattaacatcaatctcaagtaaaacatctttgccatcatgaagcatcttcttcactggtgcaagaggtgtaccataatagtgaccgacatatttattatattctaacaactcaccatttttaatagcctcttgaaagcgatcttcactaacaaaaaaataatcttggccattaacctcacctggtcgcggttgacgcgtagtcattgaaactgaatattcaaatggaaagactttgttttcaacaatcgcgcttttaacagttcctttaccaacgccggaaggaccagaaagcacaagtaataaacctttatctgccatgctgaactcctcttaacttgtaatatatctagtttgcactaaaattgtttctttttcaagttttctctttgcatacaaaaaaacagacaaaatcgtctgctcctttactaaattattttctcgaatgtctcacacactacttcagtttcatctgtgaactctcgtcccagttcttgacattcgcgcgcaaaaaatttctcgtgtactttacgccaagattcatatgagcgatcgccctcgccttctaaataggcatgctcagctgagacatttttaaatggcataatctcaacagtcttattttgaatcacacaaactggttcatttcgtccatttaaaacaattgcgtacatccctacaaccggtacatcttcttgcgcagaatacaggctagtcgttgccgtcttaattccacttttgaccaaatcactaagaatatctgcatcccggctattagctccaaaagcaaaagcaccttctaatgctgtaggacttacttgatgttctacacaaaaatcacgccaaaatttactaatactagtcatctttaatactcttaatcaaatctgcagcattcttctttgctgcatcggttacatcttgtccagccatcatctgtgcaatcgctgtaatggtttcttccttgctaagtgggcctatttgagtaaaggttgaaccatcttttacttgcttagctaccaagtagcgttgatcacccgcggcagccacttgtggtgagtgcgtaattgcaattacctgcttgttgcgaccgattgagtgcatctttttcccgatagcagccgatactcggccagaaactcccgtatcaatttcgtcaaaaatcatggtacccactggttcaactcggctgaagattgccttcaaagctaagatcaatcttgattgttcaccaccagaaacaattttaactaatggcattaaatcttcacctggattaggtgcaattaagaaaacaatcgcatcagttcccttatcggtaaatgtctttgtttcatcaaaattaatagaaaagcgagctttttccatgtagagatcagctaactcttgcttaatctgctcttccagagaatgagccactttttcgcgtattaaatgcagatctctagcttcttgggtcattctttcttcaatcttggcaacttctgcttgcaatttttcctcatcaaggccgcctgtttcaaattgactgagttctttttgtactttttgataaaaagcaaacacatcagccaaggttgggccatacttctttttcaatgaattcaaggtatccaagcggttagtcacgtattgaaaacgttcctcatcgaagtccattgcatccattaagttcgataattcactgcgggcgtcatttaaagcataaactccatcatcaactgtcttagcaaaatccttaaattttgaaccaaattcagttaaatcagtcgcagcattttgcgcatctccaagtaaagttgcaattccatgctcatcgtcatcatacaattgcatgaagtaattcgccgtatccgcaattttttgataattatttagttcgttatattcttcctcaagtttctcatcttcttgtggatcctcaaggtcggctgcttccaattcattattctgaaactgcagaatatcttgcttctgagctaattcttgggcatcttgacgcaggtgcagcaattgactggttagcttttgccattgagcataatcagtttgataagtggctaaatctgccttaaaagaagcaggggcataattatcaactaggtcaatctgccggtcctgatccatcaaaatttgctgatcatgctggccgtgaatatcaaccaaatagctaccaatctcgcgcaaaacattaatcgtcgtcaattgcccgttaatccggactacatttctgcccttgacagctaattcacgactaatcaccagctgatcgtcatcgtgcggcaaaccatattgatcacacaattccgcgatcttttctttttgatcatccaattcaaacaagccagtaataatcgccttggactcacccgaacgaatcatttctttttgaccgcgaccacccatcagtaatgaaacagcatcaataataattgacttaccagcaccagtttcaccgatgattaccgtcattttttcttgaaaacgaacctttaagcttttaataattgcaaagtttttgatatctagctcaactagcatagcttcactcctatagaccacttacggcgcgctcaaccacttcagctgggctcccttgccataagttgcggccaccatttgcttcgtctttttgtaaatgaatcaagaattcaatattgcctttgccacctttaattggtgaataatcaacgcctaaaacattgaagccgatctccaatgccttttgcatggtgtgctcgattaccgccttgtgcacttcatgatcatgaacaataccgtgtttaccgacattctcagggccagcttcaaattgtggtttaatcaaacaaacggcatcacattgattcttcaaaattgcatacatcggtgccatgatcaaatctaacgagataaaggacacatcggtcattgcaaaatctggcagtccttgatcaaaatcttccggcttcgaatagcggaaattctgcttttccatcaccactacacgcgggtcgtcccgcaattgccaagctaactggttgtagccaacatccaaggcatagaccatctgagcaccgttttgtaaagcaacatcagtaaaaccgccagttgatgcaccaatatctaaacaaattttatttgttaaatcaatgtcaaagaccttaagagctttttccagtttaaagccgccacgcgaaacatatttcttaccatcatctttcacgtaaaacttttccccttcaggaaacttagtcccgctcttatcaattcgttgatgattgtgatcagaaaccagccccgccataatcgctctttgggcagctgaacgagaatgaaaaattccttgttctgctaataaaatatctgctctttgttttgccatttataacaccttttgataaagatctaaaaagccagttagcacttcgccatttagtccatgcaaatcatcttgtgcttgcttaattaagtcagttagttctttgcgactttgatcaattcctaacaaagttaaagtattattctttccttcagcttcatccttgtgcgtagctttaccagcttctgcactagtttcaacgacatcaaccaagtcgtcatagatttggtatgaacgaccaaaaattttggcaaaatcgactaattttacctgttcaatatcactagctcctgcataaactgcagccatctcaacgctagcctgaattaagcaaccggtcttcagccattccatcttattgataaacttggcatcacccgcaacactagcattgttagttgaatcaatatccaaatattgaccgccaaccatcccattagggccaactgctttggtaattaaatctaccaatttcgccgacttactgccttccgcaatccattgaattcccatcggcaagagcgcatccccagctaaaattgcctcagcctcgccccattttttgtggctagtcagcttaccgcgccgatagtcatcgttatccatggcaggcaggtcatcatgaatcaaggaataagtgtgaatcagttcaatcccgcaggcaatcctaatttcaggttcttcaatctttctgcctaaagcatttaacgtagctaaaaacaataacggacgcaagcgcttgccgccacccatcactgagtaggccataatctgactgatcttttgatcttcaacctcactagccaaatgcttagccagataatcatcaattactggggtccattcatctttaaaataagtaaatgctgtcatatttattcctctggtgctgatgcgttatttggatctaatttgtgttctgtgccatcactatcaatcaacttagccacagtttcttcagcactgttaagcttcttttctaaatcacggctaatctttacgccctcctgaaattcttttagggcatcttccaacggaacatttccgttttccaaattttgcacgatttgttccaaattagttaattgttcttcaaaattatttttcttcactgccattttgttcttcctttacctttgtaaccactgcttcaacttgtccatctttaaaatgcaatcgcaaatgatcatccttttgaacttgtttcacagaactaatggttttcccttgttcatcagttgaataaacaaaacctcgctctagcgtcttcaaagggctatagtcatccaactgctgcattacttgggtaaaactattgcgtttatttttcaaatagtgctgcatattatcaatcagtcgttgctgtaaaaaatgctcttgttgctgcatctggccgattctcttatctggactaacgctaaacaaacgctgcttcaacagttgataaccttggacagaatgggtcaaccgattttgcatactattttgcagcctttgttttaattgatcaacttgttgaatctgctgatcatacagtctagtcggctcgcgcaggatgacagaattctgcacccgacttaagcgctcacgtttcgaacgaataatattttgcatgctagctaccaactggctggttaattgcttaatatgcgcaatttcgtccaatgtattaggcgtagcatattctgctgcagcagttggtgttgctgcacgcgcatcggccaccaaatcacacaaggtagtatccgtttcatgaccaactgaagaaattactggcatctgcattgcgtaaacttgccgcacaacctcttcttcattgaatggccacaaatcttctagtgagccaccaccacgaccgatgatcatgacatcatacttgtcgccttgagcggcaatctggcgcattgctctcactaatgaatccgctgcagtatcaccctggacttgcgcaggatacaaatcaatctcagcatgcgggaaacgccgattagctgtaaccataatatcgtgaataactgccccagaagcactagtaactactgcaattcgatcaggaaaatgaggcaacttcttcttatgctctggatcaaacagaccttctttggctaatttggcctgcaactgcttcaattgctcatataaggcacctaatcctgccggttccatttgttcagcataaaactgatacgagccctgtgggccatacacgctgacatacccaaccacataaaccttcattccttcttctggtttaaatttcaccttatcaaagaaggaacggaacatcaccacattaattttagatttttcatcttttagtgaaaaatactggtgcgaattacgccgataacggaagttggacaattcaccttgtaagaagaccttatgcaggtaaggatcattcttaaatttttgcgtaatataataatttaaatcagtaaccgttaaatatttattctcggccattttgtctcctagtcaatttaacaactgcttccattaagaattgtactgtaagaggacctacaccgccaggaaccggagtaatatagctggctttttctttaacattatcaaagtcaacgtctccgactaatttgccattaacatgattcatgcccacatcaacgaccactgccccatctttaaccatatctgcagttaccaaaaatgcttgtcctgttgctgaaactactatatcggcttgtcgtgtaatttcagccagatttttagtatacaaatggcaaacagtaacagtagcattttcctctaacattaatgccgctactggtttgcctacgatattgcttcgaccaataactacaactctcttaccagccagcgtaatttgataatgtttcaataaagcaataatgccttctgcagtagccggttcaacaaagtgattttccatccaaagttgaccaatattcgcaggcgttaaggcgtcgacatccttattagggtcaatcctttttaacaaggcatctgcatcaatctgttcaggtgctggcaactgtaccatcaagccgttaatctcaggatcagcatttagcttatcaattaatgctaaaacttcttcctgtttagtatcagcgggcatttgataaatatcttggataattcccatcttttcagcccgccgcttttttgttcgaacataaatcttgctagcaggatcatccccaatatttattacgcaaaaatgtggcgttattccctcttcttttaatttcttaactttttctttaagattttgccctaattcatttgcaaatgctttaccatcaagaatctttcccataaagcccgttctccttttgtaaaaaaataactggcaaaactgccggctattcatcgctatttaacaaagtttgctaacattccattaataaatggcttttctttaggctcagcaaattcgtcacataaatttaaagcttcgttaactgctgccttagcatcaatttcatcgctatgcttgatttcaaataaagcaacttccatgatggctaccacagtttgactcacacgttcaagacgccagccctttttcaaatgactagttagttcagactgtaaatttttgcgatcttctagtacgccttcgattaacttcttagaataggcagaaagctgttttaaattaagcgttgcaacgacttttgcttcaacttcttcggcagttaaatctggctcctgattagccaaataaacggcttgcatagcaacttttcgactttcgtgttggttcattatttttcttcttcgtcctccggaaacagctctgatgtagtctggtcagtattttcatcttctgggaaaactaaaccgacaacatgaacgttgattgccttcagctcaagatcagtcatttgcaataattgtgccttcaacttcttttgcaacgtcattgcaaccttaggaacgttaacgccgctttcaagataaacataaatatcagcaattagcttattatcgtcatcaacactaatatttacgcccttaccatgatcttcacgaccgaaaacccagtttaagcctgatttcaaactgccgcgcattccggcaacaccatcaactttttctgcagcaatacccaaaataacttctagaacacttggatcaattttaatttgctcgctgttttcttcaccacttaaaagaatttttgaactatctgccattttgttacctcaaataaactacttatttgcacgtgatacgtaagtaccatcagcagtgttaatagttaaaacgtcaccttcgttaatgaagaatggtacgttaactactaaaccagtttccatagtagctggcttaccaccacctgatgaagtatcacccttgatgttaggttcagtcttagcaaccttcaaatcaaccgtattaggcaattggatacctaaagtttcaccttcgtgcataactacgttaacaatcatgttttccaataagtaattagcttcatcgccaatttgttcatttggaattgctaattgatcgtaagtagaagtatccatgaatacataacttgagccatcattgtacaagtattgcattgacttagtttgaatgtctgcagtttcaaccttagcagttgaacggaaagtatattcttgtacagcaccagttctcaaactcttaagctttgaacgtacaaaggcactacccttacctggttttacgtgttggaattcaacaatgcgccataaatcgttgttgtattgaatagtcaagccattcttgaattcgtttactgaaatcattgtcatattaagtccctcatttctacaattattatcttaccaatcttgaagcgtttttaccataaatacgataaattaaatagctattatagggaaatcaattcatcctttggcaaagtggataaagtttcaggcgtttgatcatggaccaaaatatcgtcttcgattctaacaccgcccttgtctggcaagtagattcctggttctacggtatgaaccatattattgaccaatttagtagttctaaaaggtaaagctggttgacacaattcgtgaatttcaagaccaatgccgtgaccgatcccgtgtccaaaatactgaccgtaaccttgttctgtaatataatcacgtgctgctttatcaacatcatatccagtattacctgcaactgccgcggcaatgccacggcgttgtgcttcatgtacaatatcatagattttatgcatttcagcatcaacttcacctaatgaaacagttctagtaatatctgccgcataaccgtgataaaaactaccaaagtcaatgacaatcatatcgccttcggacaattctttgtcactagcaacgccatgagcccaagccgaacgcacaccggaagctacaattgtatcgaaatcagggccatcgccgccattaactttaaataggtagtccaatttagcaccaattgcacgttctttaacgccaggcttaatcatcggcaaaatacctttaaagctttccattgaaatatcaattgctttgcgcaatgccgcaatttcaagatcatctttaatattacgtactcgttcaaccaattcttcaaccatcacaaattcaagttctggatttagttgcttaagtttttcatattcactcgctgaaacgaattcaccttcaactaagaccctcttgacgtccatttttttcaaggccttagtaagttcttcataatcactagaatgtttcattacaacatccatttcgccaggtgcttgtgctttaatctgtccagcaaaacgagaatctgataaaagtactcgttcgccactagcagtcaaaattaattgtgcttcttcccctgtaaaattggttagatatcgataattagcttgattaaaaataatcaatgcatctgcatttgcttctttaattaaatcagttacatgctcaattcgctggttaattaaggataataattcttgcctattttccatctcagagaccctctttttgtatgatattggtttaattatacatgtttctgggcggaaaaagccataaaaaaagacgggtggcttatgctactcgccttttcatgttaatctctgaattacttagcttcttcagctgggtatacagaaacttgcttcttgtacttgccaagacgttcaaatttaacaacgccgttaacaagtgcaaataaagtgtcgtctccaccttgacctacgttcttgcctgggtgaaccttagtaccacgttgacggtaaataatagtacctgcgtgaatagtttgaccgtcaccagccttggcgcctaaacgacgaccagctgagttacgaccgttggcagtagaaccaccacccttgtggtgagcgtataatttcatacctaaaatgttcatattcatttcacctctgaattaagcttcaatcttttcaactgtaaccttagtgtaaggttgacggtgaccatacttgctgtgtgagtgcttcttaggcttgtacttgaaagttacaactttcttttccttgccttgcttttcaactttagcagttaccttagcaccatctactaatggagtaccaaccttaacgtcgtcgccattagcaacaaggataacttcgtcaaaagttactgagctaccttcttcagcatcaagcttttctacaaatacgctatcgccttctgcaactttgtattgcttaccaccggtcttaataattgcgtacatttgtacacctccgaaaaaaatacttagactcgccgaactggggtgcttcttacataagaagacttctaacctcaagccgtgcggttgcagatgtggaggtctccacaaatacaactcttatatcatacaacgcttttagactaagatcaattatttttttacattcgccattgaccgccatgcacttttgcaacattttcggtaatgataaacgcatcctgatcgatctcatgtactttagaaataagtggcccatattcacgtggatcaactacgattaataattgacgcttgctttcgtcgctatatccacctataacatcataaatcgtcaggccttgataatcttctttaagcatatcttgaattcggtctaaatctgaattactcataattctgacttgatactttttatcaaaaccggtctccgcgtagcgcatcgtaatggcagttaccacttgagaaaatgctgctaagaagaaagcattccaaccatcgacaaaaatgttcaagaaaataattaccatatcaatgcataaaagcgtagttgcaggatttaaataaaaatatttcttcagaatcatcggcggaattgttgtcccaccacttgaggcattaacgcgataaagtagcgaaactccaagtcccattaatgcaccaccataaattacggctagtaggtcattattcactgctttaaagctaggcgtaacttccatcaaaactggtaagagcaaactacctaatgcaatattttgggtagtctttttgcctaaaaagattgccgccaaaatcagcatcaagccattcactacaaatactgtaattgatcgattaatcccccagaccgcatcgactagaatagaaatacccgttgagccaccagctgcaatattaatcggtccataaaaaagattgattgatattgcgattatttcaagtcctgctaaaaataccaaccatctcatccaggaacgttgtttaatgtttttcattattaagcgtcctttcttttagttagtactattttaacgaaaaatcatctgttagctcaagcaaacaaaataatgttaacaaattatttatttttaacttctttataatcgattgattgcgttccttcataagcaggtaaaccattttcagctcgatataatgctcgctcaaaagagcggtagcctttagatgaagaaacggcaaatttaacaccatactttgaagcgaattcctgaatattccaagtagcatcatgagcagcataagctgtcatcaagattacaatatctaagtctttgatttgccgttccattaccttcttcttgccttcaaaagcatctattggaattgggatcccattatagcgcgaaacaatcccttctaatattccttcattttgattatcaccaatcgcaattcccacccgctgatagtgcaaattcatgtcgagtttagttaactcttctgtttcttctttctttgacttatttttcttttgatacgacagatctgatttcttaggcggatcaacttgataaatccaacgaatctgtactgcctcagcaggatttttcttaatgcgaacatcacccgtataccaagctagatctacaattgaaccatcttcaacatgaatattttcaccttgataataacttgaatcaaccggaatcgtgatatccttaccgcgaattctcaacttttcgcccttaatatttctagtgatagctaattgattggccttgccgcggaccacagcataccggaattcttcgattgggtcataatcacgcatgcgcaatttgcgataacccaccacgcgcaagacttctgcttcataatttggattatctcgattttcaatagcttcaactatgtcaccgctctttaaattcaaagagtgaatttgtgattctttaatacggtaaacaatttgaccactatcattaatcaaattacagcctgataaagcccgaataacagtatagcggcgtcctttacgataatcgcgcttaggttgctctttgggcttcattgcttcttcaaaaattttcttgttaacagcttctttagttgtcttagatttttgaattgcctgatccaatttacccaaaacattgccatagcgcttgccaacgcctggaacaaacgtcaacttgtgtaaagcatcaagtgaactctttttagctttttcatcacctggagtctcaattaaggctgtcagcccaatcaataattgcttaatttgctttaaatctgcatttctttgtgcaattgattgtgtatttgcaattttattcttaggttgagttactgatttagtctcagatttttcagctgtattatcttcggccatatttaggatagctttaatcgcacttaaactattttcgagacttttatcatcagcctcagttttatttaaaattattttgatattatttcgataatcatacattattctcaccacttttattgtataacttactaatagtaacgaacataattatactgatttttatgaagtagtgttaattgattgatcgttttagtgattaaatttttttacgcaaaaagcagacaatctttatattgcctgcttcctaatttttctatttatcgagttctaagccaattgaaccaattagcgaaattttcacctgctgtaacacgatgaaccaatacaatacctactgcttttaccggctgactttgcgcagcagcaattggaaatgcagtagagagagcaacagtcagtgcagttgcagaaattgcaattttcttttttaaattcatttcaaatcctcctcgtaaatatctagacatcaacatcattatattacgtgggattctaaataaataattcatttatgcacacatagctttaaggctctaatacaagtttatatatttaactatataaaaaggcgactcacaatcgagtcgccttttactacaatttctaattattaagctctccactcgccgccttggccataagtatgcttacctaattcgttgataattacatgaatgtgttccttaggcgcaccagtattcttgtgcactgcttcagtaacatccttcattaagttagtaatctgctcatctgagcgacctttaattaattcaatatgtacaaatggcataatttagccctccttttttagtttaattatagtataaaaatttctcactaaaaagcaccaccgccgctgccaccaccaaagccgccagacgatccacctgaaaatccacctgagcttccggaaactgaagataaaccagtagacacgcctgaagagaagctacgttcaaaactatgctcaaaactgtcactactgctactatagaatccactataaaacagaactggtgcagcatctaattcatctgcaaattcaatcttaagctgcttcaatacctttttggatagaccaaacgctacagcatacggcataatgtcttcccataaaatcagatcaccgacgtctttcatcttgaattgaccaatatcgtctagcattttcttaaagcagcgaacttgatctgtctcaagtgcacctttttgggtataaatacttaaacgagaattgcccactatgaatgcagcaacttctaagacgatcatcatgattccaattattatcacaaaactgggtatattatttgccatcattaagctaattacccagatcgcaaagctagcaatcattcccatgagcatccccgttcggaagttgctacgctgctttttatattttttatcaagcaagtccttatcctcaacttgcttatattgcccgtcacaccatttatcaaaacgcctacccaattttttagaagtataatcccgcaaatctttcgttgtaaatgacttaccatcaccaactttgttaaaaataaaatctaataggtcatcagtcaaaacactatcatctactaaagtaattcgataattagtccgctttaaatgtttagtttgatatttttcgatcttaattttatttttaccggctaattgcatcaaataagctgtaaatgctttaacatttggtttatcagcttcatccaaaatttgcgcagcagtaggtgatatatctggaatttcataattatgtactaaatcgcgctctatttttggcttaaccccaacttttttaataaaaaagcctctaattatcaccacaaaaccgacaagtactgaaatgatcatcaatcctatactaagcatctgcttacgctgacgcttctgattagcttcttttgctaatgctgcttcttgtttttcaattgctcttttcttattttctttaacaatattctgattagcactagttaccgtagttggaaaaatcgcatgtacttcgacaccactatctcctgcaacatcatcagcagtcataataattttgccctcttttggcaaaacctgagtgtaaccacttagtggcccatgagcccaagcttttagccccttaactgccccaggaaaaatcacttcagcacgcacatgatctaagtcagtatcccaaccattaccaactattttaaagttcagctcagctgtatcaagataattagtaattgcccggtgaattagataagaatactcaactttaaccttatcattttccttaattcgatgataaaccttaaaattataagaattgccctgcttttgcaatttatacgtattatttttgcccgttgttgcggcctttatattttgtccatcgaccttaacctgaatgttgctcaacttctgttttacagccagattttgcttataataaaggccacgagcatcactatcaaatgaatacttaattgttcgatacattgtcagtgaaccatctttattaactcttgctatggctctaacattatcaatatcataatcaacatcagctctaacgctttgaccccaaatagcaaaaacgctcaataggcttaataaagccaataaaccaaggtatttcttcttcattatttatttcccatttttctgcaaaaatttatcaattaaagtatctgctcgactatgatatttacctttaaaatcatgacctgcacccttaaataagtataatttcgagtgcttaaattttttattagccataattgaataagaatctggaataatcatgtcacttgtaccatgcattattaaaactggaccatgatacttagttgcttcttttaacaagttatacttgaacaagttttcaaaataggccttaccaattgtgaagccaaataggttgagcttgtctggcacttgtttttctgatttaaaagccgctttcgcataatcagtgatcgaaaaggcagggtaaagcaaaatcaatgactttacttcttgcggatatttacttgcgagcattgcggcaactgctccaccttgactctcgcctagcaaagacacttgtttacggtcaacatcagtcctatttttaattgtatttaataccagctgtagattcttttcttctgtaaaaattgacatctttaattgatctacaccactactttgaccattcttagctccaccaggaaaatcaaaagtataggcaacatagccacaactagctaaatatttagcataactggttagatcacggtaatttcctgccaatccgtgagccaaaattactgctttcttcttaccagctaaaccctgtggtagatatatatgaccataaatatcaacgccatcttgttgaattcgcaaaacttggtctatcacttgatacttagcctgtttttccttagattgctgtttatcgactttaaccgttttaactgacgacttagccttcttaggcgtagtactttttatagtacaacccgttaaagtcagtagcatcaatattattgctataaatctttttttcaagtttatttcatccctatcagttaattaattcaggcgtttcctgaatacttttaattatacaaaaaacggcatgaaaaaaggaattaaacctttaagcttaattccttcttgataaattcaattttttaattaaaagttagccgccttaacgtacatgttacgtccgattcggtaacagcttttaccattaacgcgcatccgtgaaccataggtcttaattggcgtaccttttctaagcactctccagttagcgcggtttcccttgttattatatacataagcattgtgcttaagtacacgtgaattacctaaaacattacttgccataatgtaacgaccattgcccatgtttaaggcagtcttaccattatcaagagtcactacaccataatgagtaatattagtataagctgcatagtagccgctttgacgctcaccctttttattatagatatatgatttcttcatcacatagccagcagttgctgaacccttatcatcatctgatgaagtactcttattcgaagtatttgatgaagcatttgaagagctagcagaattggtgttgctggtagctggagcttgtgaaattgcgccattgttggaagttacattaccgtcaattgataatggtaaaacagcaatatttccatcaacgcttaatcccttccaattatcagtaaattgccaaattgaaacgccattcattgatgggaagtaattgaagtttggactatcaattctacctgaaatagcgtatgaagcgacccacaatgagttaggatacttggcaattacactattagtatcaatattattttgtaaaactgatgaactagcataaagaagtggcttatagcctgcattttttatagtgtccataaaagcaataattgcattagccgttggcgttttaccaccgtaaatgttattgcccgaacctgtttcataatcacaagcaatatatgaacctttaggtaagccgaatgcttgggcagcttgaactgcataatttgcttctgcagcagcagcacttgcatttgaactaaaagtagcaaagtgatatgccattggcatcatattatttgataaagccgttgaaatttgacttgatgccttagggttacgataggaagtaccttcgctaactttaacaattgcaaattgtgctccagcttgcgcatgacttgacaagtcagcgttttgataactagcaacatcaactccaagtgcgcgggctgcaacagaggtagttgcagcgttcacaactgcagtttgtggtatatttacttgtgtcagcgctacccctgccgtaccaagaacagtcgcgcatgccaatctaacaatgatttttttggttgtagtcaatcttaattcctccgataatgttaaaaatagttgtcgttcacacttgtcgatcctattttttggaaatcaattttagaataagctcgttccaaactttagtcaactgattcactaataatgtaagattaagttaataattgtcatatatttgtatcatacaatatcaaatgtaaaaaaatattgtctttgtagtaaaatttagcacatagatacctaaggtacgcgtggtgctagttaaatcgttctagacaataagccaaattataagctaaaattgcaatttccaaccggctttgaaagcctatcagactacgtgctcgattgttctcggcattgtaataggtcagaagcgaaaagtcgctttcaattgttctgcgaatagccatcaattgatgatcattgtgctttttagctcctgtcatatttttacgatatggtgtccaaagttcataacccatttgttttagctgttgatgcagttctttgcctaaatagccttcgtcgccaagaagatagtaattagatggatgggtattttccatcagttcaactgtctccctggcatcatgaactgatgcttttgttacgacataatcaagaatgtaaccgtcatcgctaacaatgacatgaactttgaaaccatagaagtaaattttcttggtggccttataaccaatgttggcataaccgcgaaaaattttagcacgatagttgcgaattggttggcaaacaggtaccggaaagctgtcaatgatcaagaactgtccattcaggtcaacctttttattcatttcttgccgtatctgataaatcaattgcaatagctgacgtgaacgtcgattaaaacgtgagtgtgataaacaattgaaacattcacagaatcttctttgtgattcaattcctgtcttagcttgccagataagtaaagccaaaatcagactgtccgtagttttaatttgatcaatatttcgccgatgagtaaactcagccggtgcatacaaacgataccagtgccgacaaattatcactaaatctttaaaactaacttgtaaatggtggctaaaacgcttaagcttaaggcagttcaatcagatcagactcttttctttttgatactacaacttgagtctagtccgattggacttttttattaactaaaacgatttaactagcaccacgcgtacctaaggtatgtaaaaagcctgtaagaccaatgcttacaggcataatttatgatccgggtgagattcgaacccacgacccacagtttagaagactgttgctctatccagctgagctaccagaccatcttgtatgtttgtacgtcctcaacagaacatagactattatagggaaacgttaattaaaatgcaagaggatttttcaaaaaagtttttattttttcaaattcaattaaagtataattgagttaacatagataattattagaaaagagaacaattatggaacttaaagataaaatcaaaaagtttgttactgactttagagatggtgcatatcagcatgacaccaaacgtgacagtggcttgcctcacgacatccctgaagttgaacgtcttgataatctgccttatggtccagatgaaaagtggcatactttagatgtttatttacccaaaaagcacgaagctcccttccctgtcatcatcaatattcacggcggtggttgggtttatggtactaaagaaatctaccaatattatggaatgggtttagctaagcgcggttttgctttcatcaatcccaactatcgtcttgcaccagaaaacgcggaattccctgatgaattagacgatgttgatcgctacatgcattgggttgatgagcacgctgaagaatatcgtctagatcgcaacaacgtttttatcgttggcgacagcgccggtggtcaaatggctgagcagtatgtcactattttgactaatccagattatgccaagttattttcttacaaaccattgaacttaaaatttagggctgtcggcttgaattgtgctgcttccttcatgttaaccccaagcaatttagatggcatggctagcgcctacttcactaaaaatgcagttaacaagtatcatgaacaactcgatgttgaaaaatatatcaatcataatttcctaccaacttttttgattactgccaacaaagatttcttacatgacatgcaatttaccctgtttggcttcttactcggccgcggcgttcatgctatttgcaaatcttatggcgatgaggaaaatccacgtggtcatgttttctttgttgatcaaaaagatgaattagctgacatcgcaaatgatgaagaaattgaattttttagaaaatttttacaaaaataaggacggaaaataatgattaaattttatggttataaacgttgctctacctcacgtaaagcacgcaagtggatggatgaccatcaggtcaactacgaatttcaagatttagttgaacagccaccaaaaaaagaagacttggtaaaatggatgaccaaatatcaagatcgtggtctaaaatatttcttcaatacacacggtcaagattaccgcagagaaaatttgaaagaaaaagtgccaacaatgacgattgaagaagctgcagatatgatgtcaaaaaatggtaagttaatcaagcggccattagtcgttgatgacagtaatttaacttgcggttttaaagaagatattttcgaacaaatttggctataataaaacaagcccataacctgtaactttgtggttatgagcttgtttttatttctttaaatgaatttcacgatcaaacaattgatgcatttcttgattaaagttgtgagcaatgaatacaatcgttgcatccgtcttagtcaactgacgcaaaattttcatcgtagccgcctgatcaattgcacttgttgcctcatcaatcaaaatcaacttactctggtgtaccatgcttctagctaaaacaattttctgcctctgaccaccagaaacattcaattgatcaaggccaatcttagtctcaatgccggccgaaaacttagcaatatctcctgcaaattgaactttttcaatggctgatttaactcgacttagcaattttgaattgaacatcgtaatattttcaacaatcgttactgggaataacactggatcttgcggcaaatagccaatttcagctaaatcaggttgaatcttttcacccttttgattaaagtattgaatcttgccgcgactggcttgcaattcacctaaaatcaatttgagtaaagttgattttcctgtacctgaatcacctgttagtaaaattttctctccagctttaacttggaaatctgggaaagtcacggcctcaccgtttctaaaatcgatagctaaattatggattgaaaaactaaccgcttgttctaaattacttttctgttcagactgaattttctttttagctacaaaaatctcttctcgcaatttctttgttgctcgcattcttccaccataattagcaactccttgcaaagaaccaaatagtgctccattgaagttgccaatgctggcaatcaaaccaaaagcagcccaattatttactaccaaaaatccagttaaaagaaagattagcacatctcctaatgaataagccaattgattcagataatctaattcctgatctactttttccttctcaatatttgctgcttccaagcgtcctgaattttcagcaatagtcttaaaaagcttatcgctagccaaatagcgacgaacttctgataagccaattaaccaatcacctaaagtcttcaaatactttcgattagctactgataccttttcagtagctttttgtaatggcttatccagtaatttaggtaaataaatctgaattgcggcaaaaattaaacaagcaactaacaaactccactgaaaagtcaccaagctaaaggctacaccgacaataccggctagcatccctactacatagcggaacgaatctaaatagtcattatgtaacagtttcaaatcattagtcatccgattttgcactgcactaaccgcatgcttttgactatcggcaaaataatgatctgttagttcttgccgaattaaatgcaggtaattttgaatcaacttttgccaaatgattcccgccaaattatagaataagaataccatgacatagctagacagctggattaatgtccaagttaaaaataaactcaagtttctatttttggcagcatcaaattgcaaagttaacacataatctacaactacttcgccaactgctgcaataatctgtagtcccatagccagacagaatttaattggattaagtttaaataattctttgctactcattattttccctccaagtgaacttcacgatcaaacaatgctcgttgttctacggttaaattgtgtgcaacggccaaaattgttgctctactttgcattaagttttggaagatttttgtcgttgcttgttgatcaattgcactagttgcttcatctaagtacagaatcggcttctcatgcaacaacgcccgcattaaaactaccttttgtttctgtccaccagacagcaattcctgttgtggatcaagctgtgtctctatcccatttttcaaacgcgcttgatcactatcaaaaaccgtcttatgaatcacttgtacagtttttttattaagcttaggcttaaacatagtaatattttcttgaatactgccaggaaagatcaataagtcctgtgccaaataacctaattgacgtaaatcaggtttgatcttttttcctgttttatcgcaatagattacttcacccgtacttggcttaatttgccctaacaaaacttttaataaagttgattttcctgtacctgaatcaccagtcaatacaaccttttcaccattcttcagttcaaagtcaggataagtaattctttcaccatttggatattgtactgacaagctttttatttgaacggtagcgatttgttttaaagaatcataccctttttctggtaaacacttttgcaatttagccagatcatcccgcaaagttttcgttgattttaattgcgtatatctgttcacgcaactatctacactataaaaaattccattggcaaaatatcccgctgtcagaatcgctcctaaatttacctgatgattgaaaaacaaaattccagcaataaatggaacaccaacacgaccagctatattaaatatcgcagacactaagctagtataatgtagcaatttatctcgctgatattcactctgctctagtttctgactctgttgtcccaccacctttttcaaaacaactttattctggtagcgtcgcagctcatctaaacccttgaaccatttttctaacaactgcaaaaattgcttattttggatagaaacagctttagttgctcgattggtatatttttcagtcaatttcggcactactactgcaagcaaagtaactaataatgtatagacaaccaatatccaatgaaaggtaaacagcgtaccaatagttaaaataatataaattaagtcacaaacaaaatagaagtaaacattatagtaactctcttgcactaactgcaagtcatttcccaaatgattttccatctctgagactttgtcttcaggctgctgataataatgtcgtataattcgctgtcttacctgatgaaaaagtgtctgtgtttgtttggtattttgtaaacttccccaattaaaactgacattgcagacctgtccaattaaaaattgtacaaagattaattccaaaaacagttcgaatttaccacttgcaattgcatttaactgcggactagttaagtaggtgtacattgtagttgtcagttgcgttagcgtaatcaaaaacagaactaacattgcccgctgacggttagctttaatataatctcttaaacccattattttcttcattcttttttgacaaaaacgtataatcagcaaaaaaatctctaacatgatttgtcgcaaagaaaaagcactgttctggatgctcacatcctattaacagtgcaacaaataaaggttgatttcgataaagaaaaccaccctcaattcatctactgctaatacttggtatgcaagcaaaaaatgggtgcactaaacaaggtgcaaagacagtattttgctaaacaacaaatcaaatattagagattcagtaaacgaatcatatggcaatttcctctatttctataagttaattaaaactatatcatattaatttaattttacaagctattttttatcttcagctaaatatttttgcaaaactttgaaaacaccgttctccgtattggccggtgcaatatatttcgcctgcttttttaccttgtccataccgtttgccattgcataagaatatttggcaaatttcaacatatcgatgtcattacccccatcgccaaaggcaatcaggtcatcccctgtcatccccatcttttctaggagatgctttaatccggcgcctttattaacaccttgtgtgttaacatcaatggcaaaagtagcggaagcaaaagcagaaatctggttatcgtgcttagaattaaaatctcgttcaatttctgcagccttagaactgtccattccaaatgtgatctgataaatcttatctggtaagtcattccagtcattaattacagtgctattaccagcaaagtaagccaaaaagtcgcgttcatctttttcaacattgctatgcaaatatgcaatatctcggccaaaaaccatcgtagccatttcaccatatttcacatgtacatcatgaattagctttaaaacgtcatcgcgattaagcaaataactgccagcttcttgacccttgatgattaatctcgagccattcaaagttacgaaatccattctgctggcaaacttgccaaagtcctgcttcaatctaacataaggacgccctgaagccacgataaaatgtactcctcgttgttcaaattcagtcaaaatttgatcaaattccttgtgattaaactgcttacgatcatctaaaaacgtgccgtccatatctacagcaactgccttaaatggtaaagtcattttttcaccccatcattattctattttttccaaaaataatcttatcatttttgagcatcctatttcatccgtaatctaccacgttttagtacaaaatagctaattgttaatagaacagtgctggtaagaagaaaaataaaattatcactccaaaaataatgccaacctatttttgttaaaatatctggcgttaaaatttcttctactgttgcatagatataaaaaacagcaaaaaccgatgcaattaaatagcctactccagctaatgagtaaaaaattatgctaatccattttttagtcaccataactcggtttcctagccaaacgaataaaatagccgtcactaatggcaaaacataataataccagaatcccataactatccccctgattaattttggctcattatcacatgcaaaagtaaaaaaacggtaaagaagactttaattttgggcaaaaaaagaccagctcacttcagagctagtcttatctattctattaaactaacttaacgtgcttagcatgcctgttcttgagcttagcccaaccatcgaaaaacaatgccccaaaaagcaaaatcataataattcctgccaaaataatggcattagtcgaattagcaactgctaaactttgggctgaatcaaaatcagcaacttcgtccatttggataatcaatcctgaaaacaacatggctaagccgttcaatgttagcaagccacacagaattgttaagattttagtctttaatagcttcataaaaccatgccctttctttattaattagatgaatattatacacgcattattttataattcaagtaattggattaagaaaaggcacaaaaaatagacatacgttcgcatgcctattactaactttatttattccacaggaatttgattaatactttatctacttttggattctcatgcaacttggagtgacgtgcattttttccagtaaacttcactacctgatagcttttagcacgatctgccactaaatactttaatgacaaagatgatacattgggtactgttccatcggtttgaccaccaatatcaccaatgatgtttaaaacacgaactttatttttcggatatgtttctcttacacccgtcatttgccaatagctagaattcattttgttcggttttccggcagaattcaattttaaacctttaggttgacgaattgaggcgggaacacggctaaagttcaaaccagcaaaatgtcctgccatgccgacttgcttgactaattgtggcatcttccggttacgtccattttgcagcatataataaatgatcgaaatatttcctaaagaatggttcattttttaataccataacgcttttgcagagccttcactacattagtggcgtaaacaccatgtcgagaaaagttcaactcacggttattttcataattgacttctgcaattggatttttggcaccttttttccaacttccactcaaagaaaccttaccgttaggcgccacctcagctctaatcactgagttcgtgactccagctttctcagctgctgccaccatgtgttcttcagtatgatatgacgaaccacaccgtggaaaaataatgtcggtgttgaggtgattttagtctgacttttagtatgatcaaccttattctgattagtacaagctgtcagcgaaattgtaaatatcgttgtaagtagcaagacaagtgaaaacttttttctcatttagcatcccccatttgtttaagttcattttaaagaaaagaataccaaaataaaaatatttttcgcttattaacttccatatctattggttatagccacaattaaaagtaaaatagaaagtaattaaactgcaaaggagaaaaatatgaaatataaccaatacgcttatgtcgaaactgacttcgatcaacaagtaaaagaattaatcgacatcaatttcttacctaaaaattatgcagactggaattttaacgatttgctgggcaagctcgttaaaatgacaattgctgaagcaaaaactgacgctgctaagacaacaaaattatctgaatttgctgtttcaaatgagcaaactttagctgactttttaaaaggaaagcctgaatcaattggtactgctcaattctataatgtagccttacaattacttggctatcatgttcattatgactacgaattagtcgatccaactggctttatgcaaaagaatgctttaccttttgtccaagacatttctgatgtcaaaaagttaatctctgctttttatcgtttgctcaatactcgcgccaaaaacggtcaaattttgctcgatgtaatggctggtaaggggtactttactcaattctggggacaaaataagtttaaatttttcaatggcaaagctattcctgtcttcgataccaacaaagtaattcgtgaagttgtttacgttgaaactgatcttgatactgatcatgatggtaagagtgacttgattcaagttactgttttccgaccagctgaaactaacaaaggcttaaaagtgcctgccctttatactgcttcaccatatttcggcggaattatcgctaatgaaaagcgtaaccataatgttgatgaaaatttatctgatgccgccgattggaatgatccacaatatgttcatgcaccaatagttaaagcaaagcagccagacgactctaaccacccagctaccgaagaagcagtacataaatcttcttatccattaaatgagtatatgcttgctcgtggttttgccagtgtttttgctggagcaatcggtacccgtggtagtgatggggttcgtattactggtgcacctgaagaaactgaatcagctgctgcagttatcgaatggctccacggcgatcgtattgcttacactgaccgtactagatctgttcaaaccaaagctgactggtgcaatggcaatatcgggatgactggtcgttcatatttaggcactttgcaaattgctattgccactactggggttaaaggtttgaaaactgtggtttctgaagctgctatttcttcttggtatgactattaccgtgaacacggtttggtaatcgcacccgaagcctgccaaggtgaagaccttgatttactggctgaaacttgtcaatcaaacttgtgggatgcaggttcttacttgaagatcaaaccggaatacgacaagatgcaaaaagagcttttaacaaaagaagaccgtgaaaccggtcaatattccaacttttgggaagcaagaaactaccgccatcacgctgacggcatcaaatgttcttggatttctgttcacggtttaaatgactggaacgttaagccaaagaatgtttataaaatttggcaactagtcaaaaaaatgccaatgaagcatcatcttttcctacaccaaggtcctcactacaatatgaacaactttgtttctattgattttactgacttaatgaacctttggtttgtacatgaattactagggattgaaaacaatgcttacaagcaatggccaaccgtcatgatccaggacaacttgcaagctgacaagtggcacgaagaaaaggattggtcaaatgaattaggtcaaaagaagacctactacccaactgatgacggcgagcttttccaagatggcaatggcaatgcacaacaatcatttgtcgatgaaggtggcattgaatttaagaaggctgacatctcagaaagcgactggctatacaagttcatctgtggtgatgaaaaatgggctaaaccaagtttgcgttttgaaacagacgaatttattcacccaactacgattgtcggtcgtcctgaagtaaaagttagagttaaaggcagcttacctaagggacaaatttctgttgctttagttgaattgggagaaagaagacgcttaaccgctacacctaagttcttaatgcgcggcggtcaagaacttggctatagatttggcactgatactttgcaagaatttgtgccggacaagaagactaaggctaagttgatcactaagggtcacatgaacttacaaaactataaggacatgaaaagacctgagaagattgatgctgacaagttctacgatttagacttcttgcttcaacctacctactacactcttccatctggtagtaagttggccttgatcatctactcaactgatgaaggaatgactaaacgaccacttgaagaagaaacttatacagttgatttggccaatactgaaattaagttctatgagaaataattttttattcaaatattttcttatattcaccatagccagcctgttccaactgatcatatggaataaatctcaatgctgcggaattaatgcagtaacgtaaaccaccttgatccactgggccgtcagtaaaaacatgacctaagtgagaatcagcttcgggacttttaacttctgttctctccattccgtgcgattgatcgcggtggtaagttaatttcttaattggcttagtaaaactaggccaaccacagcctgcattatacttatctaagcttgaaaaaagtggctcacctgacactacatcaacgtaaatccccttttcataaaaatcatcatattttccggtaaaaggatattctgtagcagccttttgagttacgttatattcctcatcagttagccgctttaaagcttgctctttttcttctttgttaaaagtcatcggatcattcctttgctaaatatgttcagtagtacttggaaagaaattatctattttcttttcataaatatcaaatttatattttgtcaaaaattgatttgatggatcatatattctaacctgaagcatctcatttttgccattcatatgcacttctttatttgaaacttccaaaaatggcttaaatgcagcaatcagattttgataagaactataaacatgcacattatgttcgacaatttctccattacgtgcataccgacgaccgtcgatcacgtatactgtattatcactcatagaaatcatcctctctttggcttctacttatattttaattcattttatatttattcatgacttttttactcaaaaactccaacaattatcatgttggagttcattcaatatttatttaaaattcattaaaatactgaggtcaaaactgcaccggcaacaattaatattaaaccgatcacagtataaataagacctttttgtgtcttcttttcgtgtaagaaaaggataccaccaagagtagaaataacaacacaaagttgtgacataacaaaggctaggtttacaccgttcatcttaactgaaacaatgtatgcaagagcagcaattgcgtaaatcacaccggcaggaattacttgataactttctttttccttaaagacttgtgtttgcttagttgcaattaaataaacaattgctgcaaccaacattccaatggtttcagcaaagaaaatcattacgctgtcacccttcaaggcctttggaatggaacttgaagtaatgtaaccaagtgtagtcaataccagcacaatcattgtagtggtctgattcttttttccaccctcagatgtacctttgtcagtcaatgatgtaaatgctacaccaataattaaagctaagatccctaaaaatccaaacaatttagcttgagtgcttgcccattcaccaaagatcaacacacctacaagtggcactccgatcaactgcaaaccagttgaaattggcatagtttcagaaaccccaaccttggaataactgtaatactgaccaacttgaccaataacccaagcagcaccagctaacattgctaaaataaaagtagtcgcattaaaagatggacgcttaatgagagtaactgcagcaccaaagataaatgcaccaataacggtacctaaaatttggtggtaaatgttactcttcttgacaccagcaacaaacatgggcataagaccccatcctattgccggaataaacagaaataaataactcattcgttttgtctcccttattaatgtaaaaaagttacaaaaagcattctatcaacgaaagcgcttttaatgcaagcgatttactattaatggatgacaagtgcaaatcaatatatatcagaacaccaagagttatttaaattatttttataaaaatcctacggcaaagcctattccatataggaatatacaaattattcccaaatacaataagcaccatttagccacttgcttcaaaattattgattcagatccatcttgtccaattgcagctgaagcaacagctatactctgaggtgagatcatctttccagcagttgctcccaccatatttgaaccaactacccaattactatttacgcctaaagccttagctgaagacaattgcaggttaccaaaaagaacattagctgaggtatcagatcctgtaataaacgtaccccaagcaccaattaacggtgcaactaatggatatattggtcccattagaactactaatgctgccgcaattgctgaagtcattcctgcgtagcccattaccttggctaaagccacaatagaacaaattgtaattaatgttttccacaatccaaaaattgttgattttaagatttgtcctaatttcttgaaactaactttttgaattaatccaccaataaaagtagctagcaaaattaatgttcctggtgaagaaagccaattaatcttaaacagttctgtatctttcccagtatataccttaatataagaagtcacttttcccaatagatgctgaatatctggaaacagtgatgaagcaagaaccacaaatacgaacactaaaataaatggtgaacttgcacgcaaaatttcgatagcgctgtgcttctcaatattctcttttatgtcattatcttgatgatgatataattttgccatcagaactgtagtcaaaatacaacaaattgaaccaacaattgctggtaactctggaccaacaaattttgctaccaaaatttgcggaattgaaaatgacaaaccagacatcagggtaattaatcccactcctttgatagctttaactccgccacctgttagaatcaccaataaaaacggaattataataattaataatgcaagttgtaaagtaataacaaatgataatggagtaacgggcaaattgaaactgtcaaatcttttgtgtaaatagttctttctcgtaaattgattttttaattatttatttaatcaaagtaggattctaaggtgtcctgaacctgaccaaagcctttatgaattcgattgaaataacggtcattgtagctcattgcctgaataccaataaaagcatcaagcgactgttcagttggaaactctgccttaggcttagctttgcgcttgatcacattgttaaatgattcaatcatgttagtcgaataaattgaagctctgatctgcttgggatagttataaaagaccagcagatctggttctatgtctttcaagcttctgataacatggctgtaaaccttgccccatttggtatagaagtcatgcaggacagctgtggcttcttctttgtttgtctgttgatgcacctgtttgaattcgttcatgatcttttcacgatcgtcgacgcgtactttagcgcagatattgcgcatgacatgaaccaaacagcgttgaaaatgagctttaggataagtcctggccaaggctgttttcatgccaacaacaccatcagaaagaaagagttcaacttgcttcaagcctctggacttcatgttttgaagcatctctgtccagacttcaatgttctcactaggagcaatgcagtagtcaatgacttccttatgtccattaggtttaatgccaatggcaatatagactgcttcacgctcaaacgtttctcggcgcaaaggaaggtatgtcgcatccaaatagacgcagaaaaacttgtcgcttagcttgcgtttgtggtaagcctcaacctttggaatcatctgcttggaaatatttgatacctgagctggactgtaatggctgccatacatcttttcaattagatcggctatttccctggtggtcacgcccttggagtaaagcttgataatcatgctttccaagatatccgagtgctgcttgtagccaggcagcgtgtgctgatgaaattgaccgttgcgatcccgaggcacttgcacttcaattgggccaaattgcgtatcaactttgcggaaataagcaccatttctagagttgccagtattccagccatttctggcatagggatcatagcccagaaaggcagtcaattcagcttctaacaagttattaacagcctgttgtagctctttgcgcaataaatcatttattttgtctggattgaatagagcttgagcaaaatctttggtaaaatcattcatgaaggagttcttctttctgtatgtgtttttttgttcaaaccaatcatacgagaaaggaactcctttttctaatgtttaaagaaataaatttaaggaatcattcatccttacacaaactattttacagtctcggcaaattagttacgtcactcagtgtaatcactggtaatccaattgcaccaaaggcagttggtgtagtattagcaattaaacaaattacggcggcattaatcggattaagaccaaatccaattaatatcccagcgggaattgcaactgctgtcccaaaacctgcaattgcttctaagaatccgccaaatccccatgcgataatcaaaactaaaatacgctgatcagtagtgattgacgacaaagtatcttgaataattttaattccacctgaataattgcttacattataagtaaacagtgcagccacgattacataaacaattggccatagccccatcagaatgccctctaaagcacccgtcaaagtgtcaactatagagaggttaaatcccagtatagccaatacgatagtaattaatagtccaatgctgcatgctttaatagcaggcgtttttcgaattgccaaagagtaaataagccaaataattggaattaaagccaataaaaacgaaatccacatttttattcccccctaaacacttcacttccttatctcagattataaatgtattcgcttacgaaagatagtgaaatactcttactcatggctctataataaagtttgtgatacatatttttttcacaatatcttgattgaatgctatctatcgtttatttatctcagaattattagctcacttgtgaaaataattttttgcataaaaaataatgcattctcctacttcaatagagaaatgcattatttttatctattcaactatcctacttcaaagcatcagtagcaaatgatctattctccaagctagtaagcaaagcatctgcagtatcaagtgctgtaattaatggtacattttgaccaatggcaacctgtctaatgatgaagccatcagaattcttttcaatatcgtgacccatcgtattgataaccaagtcaatcttgccatttcttaattcattcaagatattatccttggcgtcttcatcttcatgcactttagttactggatcaacatgcaaattatgactgcgcaagaaatcagctgtacccttagtagcaaagattctgtagccaatccgcgcaaatctcttggcaattggtaaaatcttttctttgtctcgatcttcgatggtaagtaatacattaccattttcaggcaattgcatcttagcacctgcaaaagctttgtagagagctttggcaaaagtgtgatcactccccattacttcacctgtcgatttcatttctggcccgagatatgcatcaacgtccgataatttgctgaaggagaagactggtgctttaacagagatcatgtctggctctggggcaagaccatcaccgtagccctgttcagccaaactttcgcccataattactcgggtagcgacctgagccatttcaatacccgtgatcttgcttaaaaatggcactgttctacttgcccgagggttaacttcaattacgtaaacttcaccatctctgacaatgaattgaatgttcataatgccgacacagttcaaagtcaaagcaagctttctagtgacatcagtaatcttttctttaacttcatcagagaaggtttgtggtggataaacagccattgagtcaccagagtggacaccggcatgctcaatatgttccatgattcctggcaaaagaacttccttaccatcactaattgcatcaacatcacattcacgaccatcaagataatcatcaaccaagattgggtggtctgctgcaatatcaacgtggtcttgcaagtattcttctaactctcccttggtgtagacaatttccatcgccttaccacccaaaacataacttggacggactaaaactggatagcctagcttatcagcagcttcaagtacgccttcatgagtagttgcagttaaaccttgaggctgattcaaatgaagttgcttaatgatttgatcaaacagttcacggtcttctgcacggttaacatcagctactttagtgcctaaaatcttgacgccatgttcttctaagccatgagccaaattgattgaggtttgaccaccaaattgaacaatcacgccttctggcttttccaagtcgcagacattcaagacatcttccaaagttaatggttcaaagtataatttatctgagatagagaagtcagttgaaacagtttcaggattagaattgataacaattgcttcgtagcccatcttttgcaaggccttgacacagtgaacagtcgcataatcgaattcaacaccttgaccgattctgattggacctgagccaataacgatcaccgacttcttaccagtcttatgtgattcattttcagcatcataagttgaataaaagtatggtgtctttgattcaaactcagcagcacatgtatcaaccatcttgtagactgggatgatgccatgctttttccgaaatgctcttacctcatctgcagtttcattccacaaagaggcaatcgttggatcactaaagccatatttcttagctaagcgcaatacatcaacatcatctttattttcctcaagtgtcttttccaattcaaccatatgttgcacgatatctaaaaagtagaaattaatcttcgttaattcatgaacatcttcagctgaataaccacgtctaaatgcctcagctaaatagaagagacgatcatcttgagctttgactaatttttgctctaattggtcatcactagctacgtgtgcttctggtgagtaaagatctttttcatcaatttctagtgatcttaccgctttttgcatagcttcttctgcagtacggccaattgccataacttcaccggttgctttcatttgggtgcccaaaacgcgatcagccttagggaacttatcaaatggccagcgtggtatcttgcagactacatagtctaatgcaggttcaaattctgcataggttgttcccgttactgggttcttaatttcatccaaagtcattcctactgcaattttagcagccatcttagcaattggataaccagttgccttagaagctaaagcagatgatcttgaaacacgcggatttacttcaattacatcataattaaagctatttgggtcaagagcaagttgaacgttgcatcccccttcaattttcaaagccctaatcaaacgcagtgaacaatcacgaagcatctgatattccttatcagataaagtttgacttggtgaaaagacaattgaatcaccagtgtgaatccctaccggatcaaagttttccatgcagcagacaatcattgcattgtcatcatggtcgcgcattacttcaaattctacttctttatagcccgcaattgatttttcaatcaaacattcagttacaggggaaagttccaatccatttttggcaatctctgctaattcttcatgattattacagataccaccaccggtaccacccattgtaaaggcaggacgaacaatgatcggatagccaatctcatctccaaaagctaaggcatcttcgactgtattaactgtcttagaaggtggaactggttcacctaatgacttacataattccttaaatttttcacggtcttcggcttgttcaatagattgcagcttagtacctagaagctcgatgtgtaattcatccaaaattcctgttttggcaagttccatagccatgtttaagcccacttgaccgccaagtgttggcaaaatagcatcaggatattcttgacgaataattcgtgaaatcgattcaactgtcagaggttcaatgtacaccttatctgcaattgttgtatcagtcatgatcgtagctgggttggaattaactaaaactacttcatagccttcttcgcgcagagccaagcatgcctgtgtaccagaataatcaaattctgcagcttgaccaataataattggacctgagccaatcaccataatcttatgaatatctgttcttttaggcatgacgctcttcttcctttctctgatcaatcattgacataaagtcgtcgaataatgaaacctcatcatgaggacccggtgttgcatcagggtgaaattgcactgaaaatgcaggatatttcttatgacgtaatccttcaaccgtcccatcattgacttcaacgtgggtaatcattaagttatccttgtcaattgaatctgcagacacagcataaccatggttttgtgaagtaaaaccaatattaccagttgcaatctctcgtacagggtgattaaaaccgcggtgcccaaatttcatcttgtaagttttagccccattagctaaagcaaagacttggtgtcccatacaaattcccatcaaaggaacatgcttttctacttcacgcaccattttagttgcctctaccatttcttctggatcaccagggccgttactcaaaagaacaccatctggatgaaggtttaatacttcttgggcagtagctgtatatggtaaaacaatacaattacaatcacgttctgctagttcacgcaaaatactgtgtttaattccaaagtcgataaccacaatattgcgtttcgaaccaggaactggatatggtgacttggttgatactcggctaattacaccttgagttacattcttagtctttaattctgccgcaattttttctgcattttcttttgaatctgcaatcttaccacgtaatgtaccgtgaactctcaattttttaactaattcacgcgtgtcaattccctgaatacctggaatgttcaaatgctccaaaaactttggtaaggttgtctgcattcgccaattatcaggatgacgggcaacctggtgacaaattacgcctttgatccttggctcaagtgactcataatctgccaaggtaataccatagtttccaattaaaggattagtgaaaaccaaaatctgatcggcataagattggtcggtaattgcttcttgataaccagtcatccctgttgtaaatacaacttcaccaactgtttcgcaatcagcgccaaaaccctcgccagcatagatgctaccatcttctaggattaaataccgcattattgttcatcccttctgtatacaacctgaccatcaaccatggtcattacagtttcaccatacaccttgtcgtccgtaaatggtgtattaacgccttttgacttatagtcttcttcttttaattcagtttcatggtctaagtcaaaaatcgcaatatcagctggcttacctggttcaagtaccccggcattttttaagccaaacgttttagctggtttatcggagagccatgataaaagctgctccaaggtgaagactttttcttctttgacaaatttagtatataaagtagaaaatgctgtttcactaccagtaataccaaaggctgcgcccttcatgccaccttctttttcattgcgagcatgaggagcatggtcagtcgcaattaaatcgattgtaccgtctagtagtcccactagtaacgccgcttgatcttccttatttctcaatggcggattcatcttataataaccgttgtccttaggaatatcgtcatctgttaataaaatatggtgtggcgctacttcacaggtaacattgattccacgcgccttagccattcgaaccagttccacactagttttagttgatacatggcaaatatgataatggacgcccgttttttgtgctaaaagcaagtctctagcaatttgcgttgtttctgctaattcagttactggcggcaagtttaattccttggctttaggtccttcattcacgatccctttattaaaaagcgaatcgtcttgtgcatgagtagcaatgatcaaattattttccttggctttttgcattgccaaatacatcgtttgagcagtttggactccatgaccatcattacttaaggcaaaagcacctacctttttcaatgctgcataatcaggaatgacatcagtagtttcatcattagtgattggtccatattgaaaaatatgaaccacacctttttcattgttttcttgtaccattttttgcattagctcaggcgtattaggtacaggcgttacattaggcattgcccctaccatagtaaaaccaccatgagcagcggcttcactaccggttttaatatcttccttgtaagtttgtccgggatcacgataatgaacgtggacatcaaccagtccaggactaactagcttgccacttgcatcaatctctttatctgccgttaagttagtccctattgctttaatcttttgatcttcaattaaaacatctgctttaattagacgaccattttgataaactgtgccattcttaattactgttgccattattctaatcctccaagtcgtctaccgcgcaatactgcctcgatcattgccatacgcatgaacacaccattttgcatttgtctgacaaacatgcacttatcgctttcaactaaatcaccgctaagttcaacatcatggttaattggacccggatgcatgatgatggtgtcgggcttcaatgcactatagcgttgatgattaataccatatttttcgtgatatgctttagcattaaaagtcttttcattaggatcgcctgcatgacgttcatgttgaacccgtaagagtatcatcacgtccatatttgaaactaattgatcaatttcttcatacttaccatattgatcgaattctttatcataccagtaacttggacctgagaagtaaacttcagcgcccaacctagtcaaaagttccatgtcactttttgcaaccctagaattagtaatatcaccaacaattgcaacctttaagcctttaaagtggccaaaatgttcatgaatagtcatcatatcgagcatacattggctaggatgttgaccgctaccatctccagcgttaatcacaccaatatttaaatgttgatgttcttttaagttaatcaaatcattgtaatactcattctgtgagtgacgaatcacttctaagttgacacctaaggcgttcataattaatgaagtgtcatataaggtttcacccttattaacagacgaatgagccggatcaaaaggaataactgtcaaacctagttttctttcagctatttcaaagctcgtatgtgttctagatgaatcttcaaaaaacatattagttacataaactggcttagttaaacgtggtgttgcaccgccttttttgaagtactcagctctcctgattaaggcttctacttcattactatccaaattttcaacactcacaaaatgtggtaaattaacaagatttaaattttccattttctattctttctatacaaaaaagcctgaagcatttaattgctccaggcctagagtcttcccgtgtacacgaaaagaaatcaacccttctggccctctctggagtcaattaaatggttggatatttaactatcttctttttattttggtaaagccttcagttcaactgaatctttgccgtccttatcaattacattaacagcaacctgttcatcggcagaagttggaatatttttaccaacaaaatcagcacgaattggcaattcacggtgaccacgatcaactagcactgcgactctgattgaacttgggcgaccaacgtgcatcaaagcatccatcgccgctctgattgttcgtccagtatagataacatcatcaatcaaaacaacatgcttgtcatcaatattaacaccaacttgatcagaattgacaactggatcttgctttaaactagcatcatgacgatcatcccgatataaggtaatgtccaattcaccaactggtacatcaacgccttccaatttctgaatacggtcatgaattcgtttagccaagtaaacgcctcgcgttttaatccctaccaaaaccaaatcatcggttcctttattttgttcaatgatctcgtaagtaatacgggttaaagcacgcttcattgctagtgcatcccagatttcttttgccattatagcctcctaattctgcccatgaaaaaagctcccaatctcaactgagactaggagctttagtaaagtcgaaacttaagttaagcctgccttgctagcctcacgggactaattttaaaggacattcattgctttaaagttactgtaattagaaacgtttgtcaagctctaattaaattttacttgaccaactaattcattgatatcttcaatgcctaatttttcaagttcttgcggcaaggcatctgcaatatgcttagaagcaatactatctttaaaatgagcagtaccaaccgctacggcattagcacctgctaacataaattccaccacatcttcggccgaagcaatgccacccatgccaataattggcaaagaagtaatttgacgcacttgactaatcattctaatagctattggcttaacagcctcacctgataaaccgcccatattatggcctaacagtggtctgcgttttttcacgtcaattcgcatccctagcaatgtattgatcatcgataagccatcggcaccacccttttcggcagctttagcaattacagtgatatcagtcacatttggtgttaacttcacataaattggaatattgacaactgctttaatttttctagtcaattcttcaaccacatcggcatgcacgccaaagctcattccaccttgagccacattaggacaagaaacattaatttctaaagcattaaccaagccagaatttgacagcttttgtgctacttcaacataatctgcttcactatcaccgccaacgctagccacgatcggtaattctggatattgctttctcaatggttctaacttttcactaatcaccttttccacaccaggattagtaagaccaaccgaattcaaaaccccatcatctaaaacgtcaatctgtggttgcggattacctgtggttgcatgtggcgtagttgtcttaataaccattgctccaagatcatttaagtcaaacttcttagctgcaggcacatcgccgaagccaaaagttccacttgctggcataactggatttttcaaatctaaacctggtaattttacatgtgtattaaccataattttcctccaaaatgaatgctcacggacactctttattttttcaagaaatgattctacacgtgattataattttttccaagcaaaaattttatttgtatttttacttttgaggtgttaaacttcaccttgatcaaactttaaacggtacagagagaccgcaagttcaaaatattgacttaaattatctaggaaaagtctatccttggtgtctctctgcgctaagatagactttttttgtggaggaaaaatgaaacctgtaattgttgcattagatattgacaatgaagagcaactgcataagattttgtctaaattaggcaaaccagaaaacgtctttatcaaagtcggtatggaattattctatcacgctggcaaccaagtggttaaagacttagctgagcaaggttataagattttcttggatctaaaattgcatgatatccctaataccgtttataacggggctaaacaattagctaagttaggaattacttttactaccgttcatgctttaggcggcagtcaaatgatcaaatcagctaaagacggtttaatcgcgggtacacctgctggcaaaagcgtgcctaagttactagcagtaaccgaattaacttcgatttctgatgaagtattggcacatgaacaaaattgcgcactgtcaatgaaagagcaagttctttcgctagcaaaaatggctaagcactctggagcagatggggttatttgttcaccacttgaagtaaaagaattacacgaaaaagttggcgatgactttttatatgtcacaccgggaattcggcctgctggcaatgctaaagacgatcaatctcgcgtggccacaccagcgcaagccaaagaatggggctcaagcgctattgttgttggacggccaattactttagccagtgacccagaagctgcatatgaagcaattaaaaaggagtttaactaaaatgcataaggatcaaattatcagtcaacttattcaagaaaaaattatcactatctcacctgacaaaccattcacttacgcaagtgggatgctttctccaatttacaccgaccttaggttaacggtttcatatccagaattacgcgatatgattgctggtgatttagctaatttaatcgccaaagaattccctgaggctactattattggtggcgtcgctaccgccggtattccccatgctgcatgggttgcagataaactacacttaccaatgatctatgttcgtcctaagccaaaggaccatggcaaaggccgccaaattgaaggccgcttcagtaaagatgataagatcgttttaatcgatgatttaatcaccactggtggttccgttttaaatgcagttaaagcaactgaaaaagatggcggcaacgtcattggcgtttcttcaattttcacctactacctaccggatgcaaaagaaaactttgctaaagctaatgttaaatatgctccgcttctttcctaccctgaattactcaaaaaggaaaatgagtcaggtcatatttctagcacgcaatatgatgtcttaaagacctggcacgaagatccatgggcttggggcaaacaattcgaaaaataattaagccaaaataaagaccagtttcagtttgaagctggtctttatttttttgttttaataccaagctggcttatcaccgtcggtatttggtttatttaaaccaacattaccacgactgtctttactttggtctttaactatttcatttacataactagccacacttagacgagagacctcagttcctttaaatggggtagttgcgccttcagttatttcatagtcaacttcatctttattggtcaaccaagctggacgaataatcgtgtaatccaaatcgctagcagtaatttgatcagcagctgcacgataagtggtcaaatatgaacctaaaatattcttgttccattcaccaaatttgcctggtacctcatcatagactcctaacgaggaaatccaaatcaaacgcttaataccatcttcatccatagctttaacaactgtcttagcttgatcttcaatatttgaaccagctaaattagcataaacgatatctgcacctttaatagccggagcaagttcatccaatttacttgcatcccctacgacaatcctttcacgttgatcatcgatatcttttttatccaatttattaggatggcgtaaaaataaaattaattcattatttttatcttccaaaaataaattttctgctaatttagcaatttgtccacttgcaccaagtactgcaattttagtcatttttctttcctcatttctatcaaaatttaacttacaattacatagtaaaacttatattttgtaagtcagcgatttaccacagataacctgtatacaagtttttagttttattagttgcaaataatataaaaaataaaaaagttgtaaaattatcttagttaggagaaccaaatgaatagaaactgtcaaatcttttgtgtaaatagttctttctcgtaaattgattttttaattatttatttaatcaaagtaggattctaaggtgtcctgaacctgaccaaagcctttatgaattcgattgaaataacggtcattgtagctcattgcctggatgccaataaatgcatcaagcgactgttcagttggaaattctgccttaggcttagctttacgcttgatgacgttgttaaaggattcaatcatattggttgaataaattgaagctctgatttgtttgggataattgtagaagactagcagatcgggctcaatttccttcaaacctttgatgacatggctataagctttattccatttggcatagaatttgtgcaagacagctgcagcttcttttttgcttgtctgttgatgtatctgcttgaattcgttcatgatcttttcacgatcgtcgacgcgtactttagcgcagatattgcgcatgacatgaaccaggcagcgttgaaaatgagctttaggataagtcctggccaaggctgttttcatgccaacaacaccatcagaaagaaaaagctcaacttgcttcaagcctctggacttcatgttttgaagcatctctgtccaaacttcaatgttctcactaggagcaatgcagtagtcaatgacttccttatgtccattaggtttaatgccaatggcaatatatactgcttcacgctcaaacgtttctcggcgcaaaggaaggtatgtcgcatccaaatagacacagaaaaacttgtcgcttagcttgcgcttgtgataagcctcaatcttggggagcatctgcttggaaatatttgatacctgagctggactgtaatggctgccatacatcttttcaattagatcggctatttccctggtggtcacgcccttggagtaaagcttgataatcatgctttccaagatatccgagtgctgcttgtagtcaggcagcgtgtgctgatgaaattgaccgttgcgatcccgaggcacttgcacttcaattgggccaaattgcgtatcaactttgcggaaataagcaccatttctagagttgccagtattccagccatttctggcatagggatcatagcccagaaaggcagtcaattcagcttctagcaagttattaacagcctgttgtagttctttgcgcaataaatcatttattttgtctggattgaatagagcttgagcaaaatctttggtaaaatcattcatgaaggagttcttctttctgtatgtgttttttttgttcaaaccaatcatacgagaaaggaactcctttttctaatgtttaaagaaataaatttaaggaatcattcatccttacacaaactattttacagtctcatggaaaaacatggcaaaggcaaaatatctagaagtagcaaatgaattaagaaaaagaattaaacaaggcatctacaataagcaagagcctcttcccgatcaagagacatttgctcaagaatttaatgtcagtcgcttaactgtcaaaaaagcatttgatggtcttgaacgacagggtctggtttataaacaatccggacttggcaccttcgttactggagaaattccaattaaggaaaaagttgatgctccagctaatgcattcattggtttaagaaatcaactaggcaaagatgccgttaagagtcaaattgttcatttctctgtagagtttcctgatgaacaaatgcaaagaaatcttgaaatcaagaaaacagaacccgtttacaatattctgcgattgagactttataatgataagcctcttatccttgaacatacatacatgccagttaaattggttcctgatcttgatgagagcatcttgcataaatcaatttatgattacatccataagaatcttaatttaaaatttggacacgcttatcgtaagattcgtgctaataaagcagacgaatatgatcaaaaatatttaaatgccaaaaaagatgatcctattcttgaattagaacagattatttggcttactaatggtcaacctgtcgaatattctatcagcaagaatcgttacgatacccgtgattatgtattgttagataataatcgtttttagaggtaatatatgtcatttacaaaagaatttacttggggcggcgctactgctgccaaccaatatgaaggtggatatgatgaaggctgtaaaggattaaatgccgttgacgttttaactaatggttcagcaactgaaccgcgtaaggtaacttggaaaaagcctaatggtgaaactggagctacgcctctagtttgggggcaagaatttagtctacctaaaggtgctgttccaactattttagacggttactactaccctagccaccaaggaacggacttttatcaccactatcaagaagatactaaattaatggccgacatgggctttgatgttttcaggctatcaatgaactggtccagaattttgccaaatggtgatgacgaacaacctaatgaagacggattagccttttacgataaagtatttgatgaatgtgctaagtatggcattgaaccactggtaactttatcccactatgagacacctctttctttaattacccgctacggtggctggaaagatcgccatttaatcgatgctttcgttcactactctgatatcgtgatgaagcactacaaaggcaaagttagatattggcttacttttaacgaaatcaacgccatggacatggctccttatatgggtggcggtttaatcgatggtagcgaacaaaatcgtgctcaaggtgctcacaatcaattcgtagctagcgctaaggtagttaaattagcccatgaaattgaccccaacaaccgtgttggccaaatgctagcttattctgcctactacccttacacttgtgatcctgctgatcaacttaaagtgctggaagccaagcaagagatgctcttctacagtgatgttcaaactggcggccgctaccctaactatcgtcttaagaaatatgaacgtgatgggattaagcttaatgatacaccagaagattatgaattaatcgctaaatatccagcagatttcttaagtttttcttgctatacctcaaacgttttaaccactcatgaagctgatgctaaagctaacggtaatgtttctgctggtggtgtagttaacccatatcttgagagtaatgcttggggctgggcaactgatccagatgttttacgaatcggcctaaatgagctctgggatcgttaccacaagcctctatgggtagtagaaaatggtttaggttctgctgacacccttgaaaaagatggctcaattcatgataactatcgtattgattacttacgagaccagatcaaatcaatgcgggatgctgtcacaattgatggtgtcgatttgatgggatacactacctggtcagcaatcgatcttgtctcaaatgggactggtgagatgaagaaacgttatggttttgtctatgttgatcgtgatgaccgtggcaatggctcactcaagcgttatcctaaagattcattctactggtataaaaaagctatcacctcaaatggtgaggatttagactaaaacttttatttataagtagagcctagctaaaaaatgctagactctatttttctaaaaagatatgatgaaagcataagtaatatagatgagagaaggaaaagtatgattacaattactaaacaattcaacttcaaggctaaggatttctttgattaccttgaagaacaattaattcctgctattaaaaaagctcgcggtaatgacatgccggtaacgcttgctaaaggtactaaatacgaagtagatggtgcccaagtaaaattaaccgattacgaaagaaacaaggtctatggggctcattttaagacagatcgaatggaattagtgattaattatgtcactgaagacaacgatcaaggtgtaaaaatcaccttttctgaagacatgcttagctttgaccgtgagaaacacggcaaactacaaaccatgttttacaatttccaattaaagatgggcgcaaagaaagaattaagacgaatgggtgacaatgttttagctaatattgcagcttaaaatcgccatctcagcagcaaaaagaccataactacttctaattgtgttgtagttatggtcttttttttgttcaaattaacaatcttatctatatcaaaattaatctattagttcttagtagcgtcagcctgttccttcttcaataagacattgtcatagtgcttgatgaataggaaccaaactaagaaggcaacaagtgcacaaacaattgaaagcacggcaccttgccagctagtagttgcaagataaccactcaaacccactggagttggccatggttgttgcacaataatcttaggtactaaatgtgaagttactgcgatgtaacccaccaagccagaagcaagtggagcacaaatgaatggcacaagcaagttaatgttataaacgattggcaaaccgaataacaatggttcattaatattaaaaatggcaggaaccaattcaaccttaccaatttctttcaattgagctgaacgagaaccaaaggctaaccagattgccatccctaaagtagcacctgaaccaccaataattacaaaggagttcatcggatcacctgcaaagaagtgattagcaccatttacattagcagccatattagctaaaacaattggagtatagaatgagctcatgatagtagcaccatgaattccgaaccaccataagaagtgaatcaagaaaattataatcaaaaagccccaccaagtatcagcaattgcactgataaatgagaatggaatgtaaagaacttggaaaatatcagttcctaaagttaccaaaattagttcaatcaatgcaactacaacagcaatacaaaagcctgggatcaaagcgctaaatgagttagaaacaccagatggaactgatgcaggcatttttattctccagttgtgcttaacagtgtaacggtagatctgaactgtaagccatgcaattactaatccagtgaagataccaacggcagcaattctggtaataccatttgttgaggcttcataaccgcctgccaccattttagtcttagtaaatgtagtaatacgcatggtgctagttaaatcgttttagttaataaaaaagtccaatcttgttagactcgacttgtaaatagtaataatagaaaagagtctgatctgattgaactgccttaagcttaagcgttttagccaccatttacaagttagttttaaagatttagtgataatttgtcggcactggtatcgtttgtatgcaccggctgagtttactcatcggcgaaatattgatcaaattaaaactacggacagtctgattttggctttacttatctggcaagctaagacaggaattgaatcacaaagaagattctgtgaatgtttcaattgtttatcacactcacgttttaatcggcgttcacgtcagctattgcaattgatttatcagatacggcaagaaatgaataaaaaggttgacctgaatggacatttcttgatcattgacagctttccggtacctgtttgccaaccaattcgcaactatcgtgctaaaatttttcgcggttatgccaacattggttataaggccaccaagaaaatttacttctatggtttcaaagttcatgccattgttagcgatgacggttccattcttgattatgtcgtaacaaaggcatcagttcatgatgccaaggagacagttgaactgctggaaaatgcccatccatctaattactatcttcttggcgacgaaggctatttaggcaaagaactgcatcaacagctaaaacaaatgggttatgaactttggacaccatatcgtaaaaatatgacaggagctaaaaagcacaatgatcatcaattgatggctattcgcagaacaattgaaagcgacttttcgcttctgacctattataatgccgagaacaatcgagcacgtagtctgataggctttcaaagccggttggaaattgcaattttagcttataatttggcttattgtctagaaagatttaactagcaccacgcgtgtagtaataaattgaacagcaccatttttccaaataagttccggaaaagtaatgaagaatgccattaagaacatcatcaaaccgttcatcggtaccaaatcaattttctcttctcttcgataaatatccgtgtatgaataagcaaaagtacctgcaaatactaatgccaagatacccatagtcgagttgtaaactacttggaataagccactaaagcgtcctaaagtattcgcataaaatgcggcaaatcctggaattggaaatgcttgaggcagcacattcaaaattaagaaaactgccccgataattgaaaatgaaataacgctataaccagcgtccataatagctctaacaaaacgtgaacctgcaaatttacctgcttttgcagctagcgcatctttaaaagagccagattttgaatcagccatatttctttcccccaatattctgaaacatcattaaatctgaacaaccttattatagcgaaagcgctttctaatgtaaacgctttttattgacatacgatatattttgtttttttaaaatgtatatttttgaaattacttctaataaaaaaagttcatgtaactttacatgaactattgttggtgcttcttaaaagtctctataaccttgtgataacgatcttgatcattcataatttgatgaattcggtattcgctccaaacacacaataaaatgccagctaaaaacaaagttgtcataaagaacataatactttgattttcgatgaatgggaataaatacttacccaatggcaaaaacgtcaacattataaaaagcaaatttaaagctgcttgtacttcaagataaactttgctaattgggacctctcgttttcgattatgcattttagttaactgctcaatcgaagcaatcccactataaattgtcataattgccgaaacaataatgccaagaacactatgataatttacatcaataattagccacatcaagttggtaaaaaagaaaatagtaataatatatctaattaacaaatatcgactaaaatacatatacttaatgctatcttcatgtcttgagactgtaaaatagtttgtgtaaggatgaatgattccttaaatttatttctttaaacattagaaaaaggagttcctttctcgtatgattggtttgaacaaaaaaaacacatacagaaagaagaactccttcatgaatgattttaccaaagattttgctcaagctctattcaatccagacaaaataaatgatttattgcgcaaagaactacaacaggctgttaataacttgctagaagctgaattgactgcctttctgggctatgatccctatgccagaaatggctggaatactggcaactctagaaatggtgcttatttccgcaaagttgatacgcaatttggcccaattgaagtgcaagtgcctcgggatcgcaacggtcaatttcatcagcacacgctgcctgactacaagcagcactcggatatcttggaaagcatgattatcaagctttactccaagggcgtgaccaccagggaaatagccgatctaattgaaaagatgtatggcagccattacagtccagctcaggtatcaaatatttccaagcagatgattccaaaggttgaggcttaccacaaacgcaagctaagcgacaagtttttctgcgtctatttggatgcgacataccttcctttgcgccgagaaacgtttgagcgtgaagcagtctatattgccattggcattaaacctaatggacataaggaagtcattgactactgcattgctcctagtgagaacattgaagtctggacagagatgcttcaaaacatgaagtccagaggcttgaagcaagttgaactctttctttctgatggtgttgttggcatgaaaacagccttggccaggacttatcctaaagctcattttcaacgctgtttggttcatgtcatgcgcaatatctgcgctaaagtacgcgtcgacgatcgtgaaaagatcatgaacgaattcaaacaggtgcatcaacagacaaacaaagaagaagccacagctgtcctgcatgacttctataccaaatggggcaaggtttacagccatgttatcagaagcttgaaagacatagaaccagatctgctggtcttttataactatcccaagcagatcagagcttcaatttattcgactaacatgattgaatcatttaacaatgtgatcaagcgcaaagctaagcctaaggcagagtttccaactgaacagtcgcttgatgcttttattggtattcaggcaatgagctacaatgaccgttatttcaatcgaattcataaaggctttggtcaggttcaggacaccttagaatcctactttgattaaataaataattaaaaaatcaatttacgagaaagaactatttacacaaaagatttgacagtttccatgtcttttcttagccgtctctgtctgttcttttttaatgttttgtttattcatttttcttcgtctcatttcttgcctaataattatatttaagcacaaatcaggcaaaaattatcgaaaaaaaataactcccgcattcgcaggagttattttcattttcagcgattacttatcttcttttttaagagagccagattcatacagcttttcgtaaagatcaaccatttctccagctaaatctctaaaagtgatagcattcatcaagtgatcttgagagtgaactaccaacaaagttacatgcatgtggtcgccttgagcttctttagttaacatgccggtttgtgaattgtgagcttcaagaagtgatttgtcactttccttcaacttttcacgagcacctgcaatatcgccttttttagccaagcgaattgcttcaaaggctaaactctttgcattaccaccattggcaattaaacccatagcagccattaaagtttcttgttctttttgttctggagttttcttttcttctgccataaaatctgtctcactttccttagctattttagctaattaattattcacctttgatcaatttttcagcttgtgccaaaacgttagcaccattcatcatgccgtaatcttgcatattaattacgtctaaaggaatgtccttaccgtctttacccttacctttaaccttgttttcgaagtcactcttcatgtaacttacttgaggccccagaagtacacaatcgatttcttgttgtgccatcttgtcatcagcttctgatgctgggcaagcaaagatttctgcatcaataccttgttccttagcagcagcttgcatcttagttactaagagtgaagtactcataccagcactacaatttaacatgatagtttgttcagccataataaatttcctcctgaaatttttattttatagtttaattagcttttattgatctacaccaattattataaaacgctttcattgatttgtaaacaaaaaattatacatgcacggcttagtcttaccatgcttatataatcatctcgagcaaaagatatatacttttatctcctgacagcgaatattatatatcctttgtaagcattttcaaatgcatattctcaacatgttaagaaaaatcctttacatacgcatgatttaacataaaaaataaatcatttttagcaaacgctttcaattaataaatgaatactgttagaatgtatatgtaatttattcctttacaatagaaaggaggcagaatcttgagtcgctatcaagacattgccaatgatatagaaaaagatattattgagaaaaaatatacaagaaaactacctgaacaatttgaactggcccaaaaatatcaaactagtcgggtcacagtcgttcacgccttaaagattttacaaaataaaaaattaatacggactgtcaagggacatgggacctttattacaagcaagtctattcccgacatttttcttaattctgatgtcaatgagcataccggctttactcgtcatgtcaataatgctctcgcaataaccagtaatgtgattgcctttaacattcgcaaacctagtattagtgaacgaaaagctctttgtttagaaaaagatgacgaagtttacgatattattagacaacgaattttaaataagaagccagctaaactagaatataccgtgatgcctgttagccgcatccccggtatcaccctagatattttgcacaagtcaatctactcttatattcaaaatgatcttgggcttaagatcggccgagcagatcgcattattacagctgaaaaatctgatgcatatgatatgaagtatcttgaatgtaaaaatgatgatcctgttttatgtattcagcaaaaggcattccttgaagacggacgaccttttgaaatttctgagtcacgtaatcgctatgaccgtggtgatttaacagttaatggcaaataagtgttacttgattaaaaaaatcaattatggcaaaatggctctcgtaagcgtttccaattacatacaagaaagtgaggaaaaatttaatgtattcagcaaaaatgcctaaaaactttttatggggtggtgcagttgctgcccaccaacttgaaggtgcttggaaagaaggaggaaaaggtacttctgttgctgatgtaatgaccgttggttcagctactaggccacgtgaaattactgacggtgttcttgaaggcaaaaattatcctaatcactcagccattgatttttatcatcactacaaagaagatattaaattaatggctgaaatgggcttcaaggcttttagaacttcaattgcctggacaagaatctttcctaatggtgatgaagccgaacctaacgaggagggtttaaagttctatgacgacttattcgatacttgtcatgaatacggcattgaacccgttattaccctctcccactttgaaatgccttttaatttagctaaaaactatggtggttttaccaaccgaaaagtaatcgatttcttcgttcgttttgcagaagtttgcttcaaacgctacaagaataaagttaagtactggatgacctttaacgaaattgataatcagtctgcattcaataatgatttcttgatggctactaactcaggcattttgttcaaagatggcatgactgacagagataaagaagccgccatgtatcaagcaggtcactatgaattggttgcttcagccttagctgttaagattggtcacaagattaatcctgatttccaaatcggttgtatgattaactactcacctgtacgtccgctcactccatcaagtgatgatgtccttttagctgataaatgggagcaacgccgtgactggttctcagatgtacatgtttttggtgaatatccaaatgcagttgaagcctacattgaacgaaatggctatcgtcctgatataactgatgaagataaaattgtcctaaaggaaggcaccgttgactgcgttggcttctcctactatcagactactaccgtttctagcgaaaaagttaaacctgatgaattaactgatttggctaaagctgttgctaagaatccaaccttaaagcgtagcgattggggctgggaaattgacccagaaggcttaagaattgcattaaatcaattgcaagaccgttaccacaaaccattattcatcgttgaaaatggtcttggagcttacgataaagttgaaactgatgggtcaattcacgatgactacagaattgactacttaagaaaccatatttcagaaatggaaaaggcagttgaactcgatggagttaacttaatgggctacttaccatggggctgtattgaccttgtttctgcaggtactggtcaaatagataagcgctacggctttatctacgttgataaaaacgatgctggtgaaggtacattggctcgttcacgtaaggactcattcttctggtacaagaaagttatcgaatctaacggtcaagacttagattaattaaactattaatagcaaaaaactgatattcagactttaatcattgaatatcagttttttattttataaatatttactgccttctttaatactcatttagctaaatgctctcgatgcagttcaatgaagttacgcacccaatctggattggtcttagagtaatcacgcaaagcccagccaattgccttattgataaaaaactcctgactatcaagattattttcaataattttttgtaataacgcggtgttcatcttctttttacgcaataattgatgctcaatcgcgacccttcttacccagaaatctggatcgtgcgaccacttgagcattagatcgtctactcgattatccgttaagccaacatagccataaattttgattaatgagtcaatcgtatcccaccattgctttgttctaacaaaacgctcaattttagctaaatcatcaaaaacaatatactttttcattgccaataaataatcacaggcaaaatattgcaattcgcgttgttcttcatcccatgcctggtctagcaacttccagtcaacttcttttttcttcttttcatctttcaaaaaattatgataaatcgccctacgttctggtgtttgtaggccatagaatagaaattgatttcgcatgtaaccaacaagatgattggccttttcttcatttgctcgagcgctaaattctttttttaatgtttcaatattcatgttttttattttagcacaaaaagaggtcccaaattctagagacgcttatcgtaaaaataatcatctacccgatcatttcaactaaaagcttggtagaataaaagtatctatattaagaaaggcataaacaatgaaacaaatttattttaaccatgatggtaatatcgatgatttagtatcttatctgctcttactacaagcaccagatatcaaacttttaggtgttggtgcaattgatgcagacggctacattgatcctagtgttgaagcatgtcgcaaaatgaccgatctttttaacttacgtggtgatgatttgactattgctcgttccaactcacgtgcagtcaaccaatttcctcacgagtggcggatggcaacttattcatttaattatcttcccatgctcaatgaaagtggcaagattgatacgcagcaggcaaagcttcctgctcatttagacatggtcgaaaaaattaaagaagcagacgagcctatcgctttagttatgacaggtccgttaactgacctggctcgcgctttagatgtcgatcccgacattgagaaaaacattgaaaaactttattggatgggtggttctcttgatgggcacggcaacgttgctatggttaacgctgacggtagtcaagaatggaactcgttttgggatccatacgcagttaaacgcgtatttgaatcaaatattccaattcagatggtcggattagaaagtacggaagaattaccacttaacgatgagttgcgccagcactgggcaagtttacgcaaatatcctgcaatggacttgataggacaaggctatagtctaatcgtatctataccatcagccgaactctacctttgggatgtgctaactacaatcagcgcactatatccagaagttgttgaaaccgaaacggctaaagcaagagtcatcactgatgggttaagtgcaggaagctttgtacgggatcctaaaggaagagaagtaactcttgttactaaagccaataaggatctcttcttccaaaagatggatgaaattttagaaagaaaataacaaaaaaagaggctcacgcctcttttttatattgccttaattgactttttgtaaagaattaccgcaatccaaactgaaatgaatgatggcagtatcgcaactacaaacaaatttggatctaaaaaattacctactctgatgaagtttgtaattgaagtaatatgttttatgttactaaatatcgcttgataaactgtaacatatattaacgaccactgaatataatattctaccaaagtgagtgtagttgtcgaaaacttaaaaattttgctagccagtcgcatcccccaataaacaaaaacacctgaaagtacaacaaatgctgctaacagcaaaaacaagtttcccaaattaacatggtcccattgactcatgatcaaatacgcaattaccatgaaaattaagaaattaattgttgaacaacacagctgaatgacaaataaaattgcagcctttaagaattcaaacttgtgctctgatctgaataacaaaaatactactagaataattgcagcaacgatgaaatatgtattaacgtgcacagttatctcctactttgcctgttttaaggcttcgcttgtagcctctttaaccccattggaagtaaatgttgcaccagtaacagcgtcgatatcagcagattgtttatccaaaatttcctgctttaatgttttttctgctttttgaccatactgcggcgtttccgtagataaatctaaatctacagttgaaattttattatcagctacagttaatgtcacacctacaaagcctgccatgccgcgtgcacgggcactatatgttccttcttttaacatcctttttcctcttttttataaaacaaaacattctaagctaaatagtgaattagttatccgacgggataattgattcactatttttattcttttgtagaattaaagtagtggtaaaacgatatgccctgaggtctttagacacttgatgtcgcataataaactggcagttttacttaagttttcaatagtctcttcgaagaatgtggacactagatgtcgagtttagaaaattagatctgatttcttaagtaaatacgttttactactaagttttggaggtttttattatgcaagttacttttggaattgatgtaagcaagtctacttctactgtttgtgaactaattggtgaaagcaaaaatgaactaaccattactaataatcgtcctggttttattcaattgcttcatgaattaaccgctttttctaaacatccgcaaattatttttgaagctaccggtgtttattcacgcagactgcaggcttttcttgaagactacggctatgaatatgttgttattaatccgcttaaagccaaaaaagagatgaatatggggctacgctacaacaagaccgataaaactgatgcttatcatttagctttaattcaaagactttatcgccatccggttaatcaaagcgaatcccaaacttataagcagcttaatgctttgagccgcttctatgaccagctgacaagtgacttggtaatagctaaaaatcgacttcaccaagctctacaatcgacttttcctgaaattgaaaatttattttcttctgctaaaggtaaaaattactggcaaatagttgtgcgatatcctcattgtgacttagtaagaagagaagataaaaaacagcttattaactggttaatgagcttaaaggggattgcttttaaacacgctctaaggactgcagataaattaattgaattagcttatcaagcttatccagttgtatcttgctctagcatagaagtcgagcaagtgcagtattatgcacacagattgcttaatttaagtgatcaaagagaaaatttaatcgcaagaatggttaagttagcgaagtctttgcctaatcatgatttagaaaacctagaaagcattccaggctttgcacagaccactgctgtcagagttttagcagagttaggagatttacgcagatttagtaatcctaataaaatcaatgcttttatcggaattgatccaggcagatatcagtcaggagaaatggactctaatttaagtattactaaacatggcaatgcagtcgcacgtaagttgctttatcgagctattggacaaattgataatgcagctaagacaaatccgtgtcatatagcagattattatgaaagcaaaaagctatcctctcaaaccaaagggttcaaaaagatagctattgcttcaattcataaactaatcagaaccatttatgctctgattatcaatgatcaactatatgattacaacgtagccacacataaccaaaaagactttagttgtaattaattgatcaagtacattataacgctaagcccataaattaaatatagaggtgggcttatttagtatgctttctaaaaaaataaatcgccactaaaagatactcatgacaaaatttaggtaaaaaataaagccaaacaccttattgcgcttgactttacgtagaaaaatactgctatataataaatataacagtattcctaaaaaaagccacaaagatattgtgtttagtatatcatattgatatactatctcttgggtcttgattgtttttataagcccttattatgacccaagtgcaggtagtagaatccccttctacctgttttattataccacaataaataactgatgttatataaaatcttaagttcttttgaaaattttctcaaaagggcttttttcttgcactatcctttctaagttacgttaaaattgaaatggaattataaagttatatttaaagaaggtaaagcatgtatccagataataatattcttacatatttaaaatggcgtggtgacgttgacttctcaacatcgccttttaatgatattgatgcacttgttttatctattttttcttatcttgaattaccaggtattgttaaaagtaacggaacgacaattagtttagagaaggctgccaagctctattttgcagatgatcatcctcgttatgataatttgcaataccaagaactatttaaattaatggctcatgcagaccgctttaaaaatgcaaaactgtcgtattttattagtaccttaactgaacatactcaatttagtgcaatcaaaattgaactaactgatgggaccaactttattgcttttcgtgggactgacgattcactaattggctggaaagaagattttgaaattagttttaaaatcactgtagcccaacaacaagcagtaaaattgctcgaaactattctcaaagctgatgatcaagattattacttaggcggtcactcaaaaggtggcaatttagctgaatatgctgccattaatattgagcccaaattaagaaaaagaatcaaacgtatttatacctttgattcacctggaattgcagaagaagttggtgctcagctccctaataagtatttgcaaaatactctacgccgctttgtgccagactttagcgtcatcggtcgcttgtttgagtcgaaaaatattccagccactattgttggtagtactcgcaagggactaagccaacacgatgctttttcctggcaaataatcggttctaacttcgacaccagacgccaccgcaatgctcaatctcaagtatataatcaactaatcaatcaatggattggtaacgccaccctagaagaacgtgagtctttaactaatgacctcttctctgctttaagctctagcggcgcaactaagatcaacgaacttgataaaaatggttttggcggttttggtgcaattttgttttcactggctgattcatctcggcgaacccgtttcgtctttggttcattattttccagcatttggcagacgatcaagagccagcaactgaccaaagcgcttttctcaacagacacaattgttggttgggtgctggtagtattcggaatcattagtctaactctaccccaatatgcagtgcgagcttttggcgccctagttgccttcacggggattggtttcagtgttcaccaaattttaacaacggcaaaatctagtctaaaagaccgacaaaaaaacttctttattatttcgtatttagtagtttttgctttatcaaccgcgttaatttctaataaccgtctactaattttcttagctcactacttcttaggactattcttaattatctattcctacattcgaattaggcaactagtctttcgtaaattacccggaatttttcagattactattgtagcgatcgaggcattaattgcttttgctttaggaattatcgtagtggttaaccctagtgcctttaatcggagagcaattattattatcggtattttgctaattgcttacggcttcttcaagttagttggcgaattatttggccagcgcagcaaaatgcccaaaaatcatcgttaaaaaaagcttgttaacttcaatatcagttaacaagcttttttcttagcccttaataaaggtattagcctttatatgctttaaaatgttatacccgattgcacgaatatgatttttactaccataagtttgattcaaaaacattacaattccattctgattatcagtagtcagttgcatccagttaacaaagtgggtatcaccaaaattgccataagcgacttttaaagtttgattctttttcagataaaaaccacctgagtaagtattaaccttagaacttaaatgaccaagataatggaactgttttttagtcagaatcttgccattttgcataccagattggattttataataatcattagccgttgaaaatagattcccagcaccaggcaattgagaaacaacattacgattagcataggtactagcattgtaatttttaccaccagaataaagatatgaaatcgcatcagtctttgaccgcggaatttgttgataaatataggtttgcttcaacttcaatgatcgaataacccgctgtttcacattagcagcataagactttcccgttactttactgataatgcctgccagcaaaacatagttagcattattgtaattaaatttactgcgtcccgtattttctcgtgcattggcttgggcaattgtccaattgatcgcgccattttcagaaaaattaactccatgattagattctgttccaattacgttaattcctgaggtatgtgtcattaactgccccaccgtaatttggtttgcatgcttcaaatttggataccagcgtgaaatcttagtattctgattgaatttcttctggtagattaactgtgtaattattgcagcagtaaccatcttttgcaaagaaccaactggataaagcaattttgtattgccatttttcagtcgtttgctgtaataaccgtagcctaagctaacacgttgagcatgcccattttttacaatttcaatgcttcctcgtaaatgatgctttttcatcatcttaagcgtatattgccgtagttgcttatttgaataactcttcgcctgcacagcatgatttgacattatcaaacacgatgaacaaaataaaatgaaagctatcccgaacttttttagtgtcttcaaaatttcaatctccttttaatcctgaactattctaccacaatcaaaaagcgcaaaatcacttttaatcatggtttgcgctttcatttttatttttttaaatttttatagtaagttcatcttaactaggtattccgcattttcaaccgtattccatgcagcacccttaagcaaattatcggctacaatccacatgttgaaggcacccttattttcataatcagggcgaatgcggccaacaaaagtttctcgcttacctgttgcattaattggttgcggataaatttgatgtttaatatcatcttccaaaacattacctggaaaggcagcaactgcatctttaatatcttgtgccgttgcagtctcatcttcaacagtaaagtagacactttccccatgagaaattgacacaggaaccctaacacaagttgcagttaccttgatatctttggcattcatgtcatttagcatgatcttctttgtttcatgaatcatcttccattcttcatgagaatagccactatcttctaaaacatcaatttgaggtaacaaattaaaggctaatgggtaatgctttttgtctcctttagtaggtaaaatatgagcatctgcttgcatgtctttaccatcaaggtaatcttgactttccttttttaattcatcaattgctgcttgccctgctcctgaagcagcttgataagtggaaacgataatttgtttcaaaccaaattttcttcgaactggttccaaagccattaccatttgaattgttgaacaatttggattggcaatgatgccgtgatgctttttcaatgcttctggattaacttcaggtacaaccagtggtacatctggttccattctaaatgctgatgtattatcaacacagacagcaccacgcttaacggcttccggcagaaacttctttgacactgcaccaccagctgaggaaagtactaaatctacaccatcaaatgatcctggtgtagtttcttcaactgtcaaatcttgatccttaaattttaaaactgtacctgctgaacgtgaggatgcgagtagctttaagcttttaactggaatcgttgattgttccaattgttcgatcattcttcttcccacggcaccagtagcacctagaattgcaacattatattctttcaccattatttttttcctcgcaaaaaattcttcattctttccatcgcttcatgtagattttcatcactggaagcatatgacattctaacgtacccttctccaccaggaccaaaagcactacctggagtaataccgacttttgcttcaaatgctaaatccagtgcaaattgcatatcatttttaccatatttagctggaatcttagcgaaaatataaaatgctccctgtggtttaactgcttgcatccccatcttagctaattcatccaacacaaaatcgcgccttctttgatatattttgcggtatttttctggatcatccaatccatgctccaaagcttcagtcgctgcagcttgagaagagtcagttgtagtcgtaaccattaaaccatggactttaccaatttgttccataatttttgccggaccagctacataacccagtcggtatcctgtcattgcatgtgacttagataatccagaaatataaattgcccgttcaggaatcacacttgcaattgaaaaatgcttaacgccataagttaaagtactgtaaatttcatcagtaattacgtacagattgtgtgcttttatcacttcagctaatgccctaatttcgctttcggtgtattcaactcctgtcggattaactgggtagtttaagataaccgccttgatattagattcttccttaagtgtactttctaatctttctggcgttaatttaaagttatcttctgacgtgttcattaatacataatctgcatctgctaaagttgcaactggccaatatagtgaaaataccggtgtaggaatagcaaccttatcaccccgattggtaattgaaaatagtgtcgcattaattgcttcagttgcgccaactgtaaccacaatttcagtttctggatcgtaaactactccacttgcttttttcaaataattgctaattgcttgcctaagttccaattttcccttttgtggcgcatagtgtgaatcattatttcgaatactttcaattgcagctgttttaacatgctcaggtgtattcatatcaggctcacccaaagtcagcttgataattccaggaatggttgaaactttattatcaaaaatcctaatccccgaagccttaacagattgaatcttcttacttaaagctaagtcatttgctaattctggcataatttttcctcttataaaatattctctaagccaataactagttcagttaattgatctactttttctaaagcaactttaaccccactcataaaggaatcacgatcaaatgaatcctgtctaatggttaaagcttcgccaggtccaccaaataaaacttgctcatgtgcaatatagccaggtaagcgtactgaatggattttaattccttgataatctccaccgcgaacattggctaaagtctcagtttcatcaggcgcagtttgatgttcaggacgattttgcgcgatcatttttgcagtagctaaagcagtgcctgaaggtgcatcttttttatctgcatgatgcatttcaataatttcaacatcagggaaatacttagcagcttcttcagcaaacttcattaataaaactgccgacattccaaaattaggtgcgattaagccacctaatttttcctttttggctagttcaatcaaagttgcttcttgatcatcactcaagccagtagttcccacaataggtttaatttgatgcgttaaagcaaaataaacattgtcatagacagctgcgggagtagtaaaatcaatccaaatatctgcagcatggtcaggaatttgacttaattggttaaaaatttgggctgttttaggtaaatgatatctttcaggctcatttactgcctttggagcaaatccagccaccaattcaaaattgggcagctgattaactaaactaacagccttttgccccattgcgccagtaaacccagctattagtacttttttaggcatctcgtcttaccaatcctttcctaaattaagtggcaacttttgcatcaatgcattagcatttaaacctaaatgctgggccaacttttctttttcctcatcacctaaagcgactaatggcaaacgacatccccctactataaatccttgagcattcaaggctgccttaacaggagctggtgaaggatacataaacaaagcctgcattttcggcgttaaccagcgttgaatcgtgcccgcttcaggataatttccttcataaagatcatcaaacattcgccgcatttgtttgcaatataaatggctagctacggaaataacgccattggctcctagtaatcttgcaggtaacgcttgcgtatcttcaccactaaataccaaaaaattaggatctttatgatcaataatgtattccatttcttctaaagatgcacattgtttgattcccttaatatttttaaggcgtgataattggactaccgtttctttttccatttttacgccagttctaccgggaatgttataaatcataattggcattttagtctgagcattaacagcactaaaatgtgcaatcatgctacgctgatcaggcttattgtacggtggcactactactaaggcataatcaattcctttaatctgtgctacctcattggtgaaggcgatagtggttgcagtgtcgttactgcccgttcctgcaataaccggaacacgtccattaacaatttgaccaaaatgctggtacaagtctatcttttcatcatgagtcagagttggcgtttctccggtcgtaccaccaactacaaagccattgcaaccttggtcaattaaataattaaccagcttttctaaactggcaaaatctattttttgattctcatcaaatggcgtaacaatcgccgttaacaaatctgcatcaattaatgttgccattttattgcctcattctattaatcaaaaatcctttgattgcatcaacgccgcgctgaatgcttttctcatcaggattaagtgtagccgtatgcaattgtgaatcaggattaccaacacctagccaaaacattgttccagggaatttagtcagcaaaaagccaaaatcttcacccgtcatttttggttcagtagtaataaagttaaccgtcggctggcttttcatatatgaaataaagttcttggttaattgtgggttattttctactggccaatatccaccttgattcaagtctaacttcacttctacaccaaagcttttctcaataccaagacagatttctttgagacgttgatcgattgtcaaaatcatattttgagttaagccacgaatcgtgccctcaattctagcttgaccagcaattacatttctaatcgtaccagcttcgattttgcctagagtaataacaccactttgaattggatctatgcttcgtgaaataatagtttgaacctgcatgatcaaacttgctgctgcaactaccgtatcatttgcatcttgcggaaaagctgcgtgtccacttttacctagaatatcaatattgacttcagttgtaccagcaaaaagtgtacccatccgacacccaatgctaccagcaggcaaagcggggttatcatgcaagccatagaactcgtcaggtttaaattgatcatgaaaaattcttttttcataagcttgcatcccaccactttggctttcctcggctggctgaaagaaaaaaagcaaattatcttgtggctgattttcactaaaatagcttaacaaacctaatgccacggtcatatgaatatcatgtccacatgcatgcattactccctcatgttttgatgaaaatgccagtccagttttttcagtaactggtaaagcatcgatatcagcacgatatcctatcgttctgtgtggttttcttcctttaactaatactagaattgcggtaggcagtgtcgacggtatctcaacttccaaataatcttgcttaaatttttgaattacctcgattaaataatcatgtgtttctttttctgctagtgctaattcaggtatttgatgtaaatgccttctaatttgaattaactcactttcacttaaaactgacattttataactttctcagattatcttctagttccgtcttactactagttttttcatcaacttttttaataattttagcaggaacgcccgctaccatcgtatgtgctggcacatcatgagtaactactgctccggctgcaataacggctccttcacctacatgaacaccctcaatcacaacagcattagccccaatcatgacattatcatcaatttgaaccggtttagctgaagcaggctcaattacaccagccaatacgctaccagctccaatatgacaatgttgtccaacaatggcacggccaccgagaactacgcccatatcaatcatggtattagccccgatttctgctccaatattaataatggcacccatcataattactgcattattaccgattaccacttgatcacgaataatagctcctggttcaattcgagcattaacttttttgaagtccaataaaggaactgctgaatttcgtgcatcattttcaatatggtaggccgtaatttgatgattttcttttaaaaatggttcaatatctttccagtcaccaaagatcgcgccagaatgagcttcagtaaaattctcaatttcctttggaaaatcaatttgtgctaaatctcctttaataaagacttttaccggtgtcttttttggtgcattaccaatgtaatcaataatactttttgcatctaactttgccatcttttttctcttttctaatttaaatatgattgatctaaatgaaccaagtcttctaaactttcacgcttaatgactaattttgctttaccattttctgcaaataccactgctggtcgaggattacgattataatttgaagccattgaatacccatatgcacctgtatccaacatcgctaacaagtctccagctttgacttgtggcaaagcttgatcttctgctaatatatcgccactctcgcaatacttaccagcaatacgaacatgttcagtcaaaggcgcttgtggatcggtggctaaaactgtttcatacttagcctgataaagtgcagggcgaatattatctcccatcccgccatcgacagtaatataagaacgataacctggaatatccttacggctacccaccgtataaaggttgtaaccggctggaccaacaattgatcttcccggttcaatatcgatttcaggtaaaggataattcattttttcagcttcagttttgatcaccttaacaatcgtcttaacaaattcttctggtcgtaatggatgatcttcttgggtatatttaatcccaaaaccgccaccaacattaataacttgtgcaagatagccatacttttctcgccaatcttgcgctactaccattaatttttgtgctcccatttcaaagccgtttaaggcaaaaatctgtgagccaatgtgagcatgaatccccaacattttcatcctaggattagctagaacttgttttaatgccttttctgcttgacctgattcaagatcaaagccaaatttactatcaatctgacctgtttgatcatattcatgggtatgtgctgaaatccctggtgcaatacgcaacatgacactaatcgtagcatcgtacttttttaaaacttgcgccaataactgaatctcatgaaaattatcaataataattttgccaacatgattttttacagccatttccaattcagttaatgatttattattaccatgaaagctaactctctccattggaaaattggcttttattgcagtaaataactcacctgctgaaactacgtcagtgtatgctccctcttctgcaataacttgatacattgcgattgctgcgaaagctttacttgcataactaacagcataggccatgttttcttcttcaaaaactttcttaaaagcccgaatttgtcgacgaatttgatcgacatcataaactactaatggcgtaccatacttttgagctaattctactatatcaactccaccaatcgttaaatggccttgctcattaatctgatctactgcaatttgtgaattcattttgttctcctgtctttttcaggcgaaacgctaataaaaaatccattgtctgcgccaaacaaacaatggattaatttctacttaatctatggtcgatagcgctccgcgaattttgttcgcgacagtccgcagtttattcaactacgccccagctcaagcctttagcatgactcagcttcggcaacctccccttttacaattcatcttcgttttgcccaactcagaattgttacttatgtcggctgcgcctcttcgattgactgtagtttacaattttataaaaacatagtcaacaaatttattataaaaatttaattttatttgtaacaatgcggcatttagagtgataaattacagtcatcacttgcaagattaaaaaataatgttagaattcaattaaatttagtctgacttttttatttaaattaatgatttctgaaaacaaaaggagttttgaaatgaaaatcgtaaagtttggtggctcttctttagctaccggtgaaagtgttgcacaagcaattcaaattattctcagcgatcctcaacgacaagtaatggttgtctctgccccaggcaaaaggaatacaacagatatcaaagttactgatctgttaatcaagtacgcagatttagccttaaagcacaagaattgtgttgaaatcgtgaataaaatttttagtcgctatcaagaaattggtcattattttggcttagctgatacggaattaagtattattaaacaaattttattagagttgcccaatcagggttatcctaacgaaaaatatcttttagctgcatttaaggcacatggtgaacggcttaatgctcgtttaattactttaattttacgccatcaaggaattaatagtcgttttcttgatccggctgaagccggtttaatcgtgactggcgagcccaatgatgccattgtcaatccagagagctacttaaatcttgaccaaattaaaattaaggctgatgaacgtatcgtatttcctggcttttttggcatgactccgtctggtaatatcgccactttttcccgtggcgggtcagacattaccggggctattctagctcgcggctttcatgctgatctctatgaaaattttacagatgtcaatgggatttttgccgctaatcctcatattattgagcatccccaatccatcaagaaaatgacttatcgcgaaatgcgagagttgtcatatgctggcttttctgtttttcacgatgaagcattgattcctgctattcaaggacagattcctatcaatgtgaaaaatactcatgatcctagcaatcctggcactatgattgtcccagaaaaggattttgtcccagataatgcaataaccggcgtaaccagccaaaaacatttttccgcattatatttgcataaatatttgctcaataaagaagctggtttcaccttacgtatattacaaattttataccaacataatattccatatgagcatatgccatctgggattgacgatattaccattatttttaacaatgattttctaaacgatcagttaattgatcaaatttgtaatgaaattcaagctacaattaatccagatcaactcgaatggattgaagattatgcaattattatggttgtcggcgaaggaatgcgacaaaaacataccatcagccgtcaaattatcgattctttaggcgatcatgatatttcaccacaaatgatcaatcagggagcttctcaaatttcaatcatgatcggtactaaaaaagaaaaggctgatgaagcagtaaaaattatttatcaaaagttttttaattagggggcattatgattaatttattcaaagttcacggttcgcaaaatcatttctttattcttgatcaaacacaattcgaacacgaattaagtgacgccgagctaaaaaattttacgcaaaagattaccaatccacaaactggactgcttcacggagcagatggcgttttagtagttaatcatcccgtgcattctaactcacttggccagatgcgtgtaatcaatgctgatggaagtgaagcatcaatgtgtggcaacggtctacgcaccgttgctcgttacctaagtgaaaaaacgggaaaagataatttcctagttgacacaatgaatgccagcttacgtgttagaagagaaaaagattttgcttctaacgtgccagcatttgcagttgagatctctcctgtacgctttaataaagaggcactcccttttgataatttaggacaagaacggattattgatgcttggttgccagaaatttatcctggattacgttttacttcaattgccgtacctaacccacatttaatttcttttgttaatcaagcagaaattaccggcccgatcttaggcattgttggtaaaaaattaaatagcaataatccctactttacagatggcgtcaatgttaatttcgcgcaaattttagataaaaataaactttttgtccgcacttacgaacggggcgttggttttaccaatgcctgtggtactggaatgtccgcgacttctcttgctcttactttaacccaccccgaaataggcaacttaaatacaccaatatcagtttataatcctggcggtatggttaaaactatcgtgcattatgaaaaaaatagttattggatcgagcttattggtaacgctacttttactcatcgaattaagctttctgaagctgacttaaggaaaggtgatttttccaatgtccagatccaaaagactgctgaacaaagtgcttatgaaaaatttattgctaatctgccaaagttcaatgacattacaactttagcgtaaaaaaatggcttgcaacacgcaagccatttttactttttaattattaatctaagtctttcaagccatgctttttcttggaaacgcgataagctactaaaccaaagaaaattggaccaaagcttgtccaaaaagcagttgcatatctatgctccaaaactggttgcaaaaccgtaaatataattccggtgcaaacaatcagctcaacaaagactactaacgcaaccgtccatttatagttagtaaacactctaaacttgcgcggataatcttttttaagaaagaatggaaatgcaccgatcaagaaaatataaggtgcagtagcggctacgttacccatatccgtcagaatttgataaaagctagtcgctgcgctaccaccgaatgagaccaccgcaattaataggcaaacgaagacagtttgagcccacatcgcattagcaggaataccgtgtttatttaatttagtcgctgccttaggccataaacgtggatcagatcccatgatgaaggatttaattggtgaataaagcaaaacaaagagagcacctgtcattcccatcaaaccagataaagcaattgctctagtaaagaatttaccaatcaataaactcgtgttaggatccaaatgaagtgcggttccaaaggctttgccaagtgtgccatatacggtatacgtaatatttccagtattggcattggctgctaaaatatctttttgataattaactgaaaagccggtcataaaaatcatcaaaacataagaaataatagtgaacaatgacccaataattaagcctttagggaaatctttttctgggtgtttcatactgtcaatcacaccaccgacggtttccatcccaccatatgcaaagactgcataaactacgaaagaaataatcgtaattggcgtttgaaaacttttattaggcgaaataataaaactttgccacccagtaatcggctgagccaattgcccatgattcataatcaagaccgttaaactagctagaataaagactgcattcattacaatcatgaaccaaccaccgattgatgacataattttaattccagttatccctctggaagacaggtacgttgatacaatcatgaataaaattgctagtacacctatcaattgagtaccatgcaagcccaaaatattccattcttgagttgtatctttgccaaaaataagggcagagattgaaatccaaagccttgaggcgcttgcaaccagccacagcacccagttagccagccatacaaaagtcccaataaaggcctatttttgtccaactgagccagctaaccatgaataaataccaccttgagcatcatgaaaagcagacccatattctgccatcattaagccagctgggaaaaagaaacagacgccagccaaaataaaccaaatgatcccagcatatgtcatttgctcataagaaacagaaacattgccaaaaccataaaccgttgtgataatcatcaacacaaggctcatagtcgtcaatgattttttagtttgtgaattttcatcatccaagataaagcctctactttctatttacactttccattttagcatcgtttatcttgaataaatttattctaattttaggctcataagaaaaaactactagttattcactagtagcccttcatttttattcattaattcttttttcaatccaattacttaattcagttacatgtaatttagtgaccgaactaaaagtcaaaacggtgacatgatcatagttgagattcaactttttctttaagcctgacatcaccttattagtttgactcttttttattttatccatcttggtacaaactaccaaaattgggatatttagatattgagcataatcatacatagcaatatcatctttggttggttcatgacgactatctactaagataattagtccctttaggttgggtctagtttctaaataatcttgaatcatttcgccaaattcttgccgcttcttctgtgaaactttggcatagccataacctggtacatcaaccaaataaaatttttcattgactttgtagaaattcaaagtttgtgtctttccaggctgtgacgaggtcctagctaagtttttacgctttaatagggtatttatcaagctggactttcccacgtttgagcggcctgctaatgcgatctcaggcaagttatctttaggatattgatcttctctaacagcactaactgcataactactgctttcaatgatcattgacacttacctgttctttattatcagtatttttgcggattacctttggcttagcgtgcttagtaattacgtccttagttacttcaacggtctcaatatcctcttcactaggagtttcatacataatatccataattgaattttcgataattgttctaagtccacgtgcacccatatttctttggattgctaagtcagcaattgccttcagagcaccatcagtaaacttcaaattaacatcatcaagtgataacaacttcttatactgcttaactaaagcattctttggttcagttagcactctgaccaaatccttactactcaatttatcaagcgtagtaataattggaattctaccaatgaattcaggaatcattccaaatttaactaagtcagctgtagtcaaatggcgtgtccaatcatctgcattaattttatctgcctcattttcagcaccaaagccaatggtctttttacctaaacgatttttaacgatttgttcaattccgtcgaatgccccaccaacaataaatagaatgttagtcgtgtccatcttaatcatttcttgttgagggtgtttacgcccaccttgaggtggaacagaggcaattgtaccttccaagatctttaataatgattgctgtacaccttcacctgaaacatcacgcgtaattgagacattctcagattttttagaaattttatcaatttcatcaatataaataatgccacgctgtgcacgttccaaatcataatcagcattttgtagtaacttaagcaaaatattttcaacgtcttcaccaacataccctgcttcagtcaaggtagttgcatcggcaattgcaaatgggacatttaaaatacgagccaaagtctgagcaagatatgtcttacctgatccagttggtccgatcattgcaatatttgatttttgtaattcagttgaagaatcaacatccatttggctaattctcttatagtgattatatacagcaactgataagacttttttagcacggtcttgaccaataacatattgatcaagttccttttttatttcaacaggcttaggtaattcacgagctgctttaagtgaatctgctcgtaattcatcgtcaataatttttttagccaagtcaacacattcattacaaatatatacaccgttaccggcaatcattttcttaacttggtcttgagttttgccacaaaaagcgcatttaatctcttcttgatctgtaaactgatttgccattatttttcctcctatatctaccaaaaatcagattatcataaattaactaatattgataaatattaagctcgaacagcaaaaaaagcggcctatagccgctctttttgagaaattagcaaatattactattacttgctttccttcttgtcatcgtcttctttgttttcaagctttgacttagcaacttgcttagcattatcagtaataagatccatagccttacgtacagtaatgtcgtggcctaacatgtcatctgataaggtgttacgtaccatcttttcatccatgttgtattctgaagcaagatccttgatttctttatcaatttcttccttagttgccttaaggtcttcagcagcaacaatagcttcaagaactaagttagttttaactctttcagctgcattcttttcaaattgtgaacgcaattgttgttcgttggtattagtcaacttgtagtaagtttgtgggtcaataccttgacgttgcatattacccaagtattggttcaattgagtatcaacatcttcttgaatcatagcatcaggaatttcatcgatagtagcgttgcttacagcaccttcaattgcagcttcttgaatagcgtcgtttgcttgttgttccttttgttccttcaagtccttcttgatcttttcctttaagtcatcaagggtgtctacagagtcatcaacgtccttagcaaattcatcgtctaacttaggaagttgctttgacttaacttcgtgaatcttagttgcaaagtgtgcttctttaccagctaaatcctttgcaccgtaatcttcagggaaagttacaactacatcaacatcatcgccggcttcatggccttcaagttgatcttcaaagccaggaataaatgcacctgaacctaattcaagtgagtagttttcagctgagccgccttcgaatggcttgtcgtcgatagtacccttgtaatcgatagtaacagtatcgcccttttcagccttacccttcttaagaacaagttctgcattttgttcacggcgcttgtcaagttcagcatcaatgtccttttggtaaacacgagtgttttgcttaagaacttcgatacccttgtagtcacctaacttaacttctggttctacagtaacagtagccttcatagtccaatccttgtccttatccattgatacaggaacaatttgtggttggccaactgctttaatacctgcttctttaacagcagcagaatatgcatttggtaatacaatatttaaggcatcttcatataatgcttcttcaccgtaatattgatcaaagatcacacgtgatacgtgaccctttctaaagccaggaacacgcaagtttttctttactcttctaaaagcttggtctaaacctaatttaatttcatcttgtgaaatatcaaaagtaagatcaccggttgtcttaccggtcttttcccatttaacagacattaattaaatacctccaatgtcaaatttgagtttgcatcttgcatactaagttatcttaccttaaaaggccgcaaaaaacaaatttaaaagaaaaaagatgcgctcctgtgaagaagtgcatctttttttaactatatcgttagaaattagtcaaggatttcagtaacctgaccggcaccaacggtacgaccaccttcacggatggtgaacttagtacccttttcgatggcagctggcttgattaacttaacagtaaattcagtgttatcaccaggcataaccatttcagtaccttctggcaattcaatttcaccagtaatatcagtggtgtggaagtagaattgtggacggtagtctgagaagaatggggtgtgacggccgccttcttccttcttcaagatataaacttgacccttgaattccttgtgggtttgaattgagcctggagcagccaatacttgaccacgaacaacttggtcacggtcaataccacgaagcaatacaccaacgttatcgccggcttcacctaagtcaagagtcttgtggaacatttccaaaccagtaacaactgacttaagaaccttgtctaccaaaccaacgatttcaacttcgtcaccgaccttaacagtaccacggtcaatacgacctgaagcaacagtaccacgaccagtgatagtaaatacgtcttcaactggcattaagaatggcttgtcagtttgacgttctggagttgggatgtattcgtcaacgatgtccatcaacttaagaatttgttcttgagcttccttgtcgccttgtaaagccttcaaagctgaaccacgaacaactggaatatcgtcaccagggtaatcgtattcagtcaacaagtcacgaacttccatttcaactaagtcgatcaattctgggtcgtcaactaaatcacacttgtttaagaaaacaacgatgtagttaacaccaacttgacgagcaagcaaaatgtgttcacgagtttgtggcataggaccatcagttgcagcaacaactaagatagcaccatccatttgtgcagcaccggtaatcatgttcttgatgtagtcggcgtggcctggagcgtccatgtgagcgtagtgacgattttcagtttcgtattctacgtgggcggtattaatagtaataccacgttccttttcttctggtgcagcatcgatttgtgagtaatcttcagccttagccaaacccttgtcagccaaaacagtagtaatagccgcagttaaagtggtcttaccgtggtcaacgtgaccgatagtaccaatgtttacgtgtggcttagttctaacgtaatgttctttttctgccattaaaatgaccctcctgtaaatttgcaagaagtccgttgagataagttaacggataattctctgttgaatattgtactactttcttcggcaaatgcctagtaaaaaagcttaagcgaaattgcctaacgaaaatatcctttgctaattatactaaatagtttgaaaatgtaaaccttttttacttattttttattgcggtaagtatttatatattttttctagtaatttttgatgactacggccatcttttctttgtaaaaatgagactaaatcactagcaaaactgtcaggctcatcaatatattggttaattttagggtaaagactgcctaataccaaattcacttctcccagcattaatggcaactgacttggactattgtgaaatttgcttccaatgctagaaataatttcacggtacttaggttctttttctagaagcagtgtattcgccggaataaagctctccatctggcctattacccaaatttcaaacttttcttcaagtcccaagcgaactaagtcttcacaaagtgacaacctaacagcaaaatctggcgttggatctaataagacgcttcgtgcaaaagctttaaaattaggcaggtttaacttatgtaaactttcataatccgactgagtaacctgttctcgttgtttaaagttttgcataatctgccgctgtttttcttcagaagctggttttaccttttctgataagtccaccccaacaagattttttagttgtagagcttcaataaaaaaattatttttagctagaatttgacagtaacttttaaatactcgctgatcagaaaaaagatcaggctcctctttaattaaagcatatgcctgatcttcttgtttattagcgcaatagagtttgcagagtttcaaaataacgtccaatgaatgctcttcacgtaatgcttcttctagattttgaatagctgcttcgagatctcccttacgctcatcttcttcagcaagtttcaataaattttgttggcttactgatgtcatttttagtctttcttattactttcttttttcttatttatttttttattttcgtctttggcatggttcttattgtcattttgtgctttttcattgcgtttctgcatagcacgatgacggttttgatttacttccatgaccacgggcaagatcactggacgacggttagttttcttgtataaaaacttctccaaatcaccgcggatatcttgcttcaattcagtccaatcaaactttttgtgttcaaaattggcctgaattgcttttttaattacatcaattgaatcactcatcaactggcgattagccttgatatagacgaaaccacgactagtgacttttggctctgcaataatctttttcttcttacggtcaattgtaacaaccgcaataaagattccgtcatctgataggacctcacgatcacgtagcacaatattaccaacatcaccaacaccagaaccgtcgatcatggtatcttcacctggtactgggtcagttaagaagaaacgcttctgcttaaagtcatattcaagacagtcaccattcttggtaatataaatatctttaggattcattccagctttaatagccaaatcacgtactacttcaagtaaacgatattcaccaattactggaattaagaattttggcttcaaggttgtaatcaaaagttgcagatcacgaccagttgcatgcccactagtatgtatatttctgcctaactggataaccgtaccgccagccttatataccaaatcactggtttcagctaccatcgtttcaaccgcatgtgacggagtagttgcaataaagaccaaatcgcccttatgaatcgtaatcatactatgacgcttcttagccattttttgtaatgagttaagtggttcacccatacgcccagtctctaatataactgtctgctcatctggcacagtcttcagatccttaactcgcatcaacaagccttcaggcacatctaaatagcctaatttcattgaagttctaacaatcttagctagatcgcggccagttaataagacgcgtttccctgttgctgctgcagcatttaaaacttcttgaacacgattcaagttagaggctttagcagctacgataattctgcctttagcatttctgaagacattagtcacaaatttaccaatatcttgttcagatgcattagggaaagatgcttctgcattagatgaatcacttaaaagcgctaaaacgcccttttgttcaatttcagctaagcgatccatatcagtccgataatttaacgcagctgttggatcaaatttaaagtcaccagtataaacaatttcacctgctggtgtatgtacatctattccaagtgaatcaggaattgagtgtgtcgtatggaagaatgaaatacttgcattcttaaaatcaatttcagtatctgcatcgattacgtggaacaaactattcttacggcgtttgttttcgcgttgtacttcaattttagcaagttcgatactcaattgtgaaccaaatactggaatatcgtatttacgcaaaatgtatggcaatgcaccaattgaatcagcatgcccatgtgttaaaaagatacctgctactcgatctccgtattgttcaaagaaatcaaggtcaggaattactacatcgataccaaataaagaactatcagggtactttaatccggcatcaagaacaaaaatttcatcattaacttgaacggcaaacatgtctttaccttgttcacgcacaccgctcaagatcataattttgatttgatcagccattatatttccttttctatctaatttttaattcttatggatctatcgatctcaacgtaaaaataatctgtttcaattttagcataaagaataaaattatgacagagacaaaaaaagccagccttttcggctagcttcattattcaatattatgtgaaaattaacgacgaagacctaacttcttgatcaattcacggtaacggttaatgtcgttgttttcaaggtaacgaagcaagttacgacggtgaccgatcttcttaagcaaaccaacgtatgagtggtggtcatgcttgtgactcttcatgtgatcagtcaagttgttgatatcagcagtcaaaagagcaacttgaacttcaacagaaccagtgtcaccttcgtgagttgcgtattccttcataatcttttctttttcagtctttgaaattgccatagttaaattcacctttcattaaataattgccgttaacaacgtttatcgtcggcgtgaacaaataaacagcgttagcggttcacaacagtcataatcatacacattattttttaaaaaagcaagcagaaattaccttgcatccgtgatatttcttaagtataatggatgaagtaaatttctaaatcattggaggtgaatttcatgccacaaatcaaatcagctatcaaacgtgttaaggctcaaaatgctactaacgaacgccgcgcttctgaattaagcaagttaagaactgctatcaagaagtttaagaacgctgttgaaagtgatagtaaggaagacgtctccaagttgcatttagaagctgaacgtgctttggataaggctgcttcaaaaggcttaatccacaagaacaaggctgctcgtgacaagagtcgtttaaacaagttagcaaacaagtaaatcttacttattactaataataaaaagaggagatctgcagtgatctcctctttttgtatactcttagacatttaagataaataatttcaaaaaattatcttctcggtaagttccatttttatatttaaattctaagtcgattgcatcccttaataaattttctagcttgtctatcttcaaccgattacgtagggctaacttaaccctatagggatgaacgcctaattcttttacaatttgtggttcgctacgacctctttgtgctaagatcttaacgaccaaaatcaattctaattgattttcaaagaccgctaataattgaattggattagtcccttcacgtaattgattatctaagcgctcaactgcttcacggtaattcttatctaaagccgactccaaaatagcgaaaatattttgtgctagggacaaatctacattttgcattactgatttttcagtaattttgttatcggtagctaccatttttagcttttgataattgcttaaaatagtgtcaattacctgatcactccgctcaattagcagctgtaaagctgactgtgtgattatatatccctcatctttgatcaaggctttagtcgttgaagcaacttcatagggcctaatttgtggctcaaccacattgaattgctttagaacagttttagtcagttttttacgcctatcaattttttcataagaagcaacaattactactacatcttctaaatcagctaagttttcaaaaatcttttgtaagtcatcaatttgtttctgtaattttttagataccttagctgttaaaaagaaaggatttttgactacaataaatttctgttcactaaataaactggattcagttaagctcgcaatcaattcatctaagccatcgctttcgcaatcgacagtcacgtgctccaaatctttaaagcgatcttccttggcatatgatctcaccaagtaatcattgagaaagtcatctgcaccccaaattaaggtatgtggattattgttatttgtatttttaaacaaagaaagtaaggtcattttttatcccgctttaaaaagtaactaaatctaggactttgcagtccgccataataccagctaatcataccacagtcttgcgttgaaacccatggtatttgctgttgagttagtgtcgttagcgtctcttgatgggggtgcccgaacctattttttcgaccagcagaaataaaaacttgcttaggatggattgcacgtaaaaagtctggattggatgatgttttactgccatgatgacccaatttaaaataatctacctgaagtttcatcctctgcataatttccttttcaccatcttgacctaaatctcctgtaaacaaccaattcttattcgctactctaaaaagcaaactcagggaatcttcattctttccttctcctgcttgatatggataaaccacattaaatgtaatctgcggttctttcacccgcattcctgcaagtaactccaataatttggtatcttttacacgaccatctaatctcttttgaaaagatggattcttaattagtccttcggccataaataatttcttaacattaacctgctctagtaatggtcctaaatcaccaacgtgatcggcatcttgatgcgaaacaaagactccatcaattgtattaattccctgacttttcaaaaatggaatagtaattcgatcaatctgaggtgtctgctttttgccactaaagtttagtttcccaccagtatcaattaaatataccttgcgaggaaatggcgtagtcactagaatactatctccttggcccacatcaatgaaggttacttgccctcgcaaaggaaaatgaatcatgctgaagaaaattacatacaagctcaacaagcccaccataattttcttactattaaagcgccagttaactttttctcttaaagaaacaattaaaataatcgttactattaatagcaacagacactgccaccaattaatttgcccaaaagttagtagtcccaacttagtagcagataattgcccaatgattttctcacctaattcaagcactttttctaataccggagcaaaatctttagtcagaccaaacgtcacaatattgaaaaaagcaattggtaaaactatccaattgaaatatggcactactaacatattaaaaattacagttaaaaaattgacctgataaaagaaaagcaatagtaatggcgttaataaaatatttaacaaaattgcttgtttaaaactgccaaacttatcagttaactgtaaacccaatgccaaaatatagctcaataaggctccagttgccagaaataaacgcggtactactaaaagatgtaaaatgcaggtcaatcccagcagatctatcgacgcaacatgatatttcttaaacttacaaattttgcctaaaaagtaggttaaactagctcttacaaagccggcttgaccattgcttagaaaaatacctagcaataaaaccaatgtacagcagacaaaagtttcttcatccgtcagtttcaagttaaaacaaaatacactaattaacaagacatagattccaacatgtaagcctgaaatgcttaacaagtgaataacacccaaatctcgataattatttagtatttcttgattttcttgagcattattttcacccaagattaattcactagcgaaaaagcctaataactgtggcatcttggcaaaatagttctgcaattcaaaacgtaattgatgcaattgatccccaaaatcagtaatcgataatagcttcatttgacaactactgtatttcaatttttggtaaatctgttttgcctgataataattctgaaaattaaactcaccaatattagttgctggctcaattgaattgcattccccattaatttctgtcactaaaatagggttcccatgcttaagcagttctttttgaacatctgttaccttgccaccaattaaaattttaccttgagcgaaattacccacacctgttaagtagtcgtctttaattcttacctgatcagggtaaattcttaattggctctgctgggttaaaacaaaattggtttttggtttacttaaaaaaatcagtaatagaaatgctccaactattagactaactatttttaaactaactcgatatttttgtactaacagtagcaaaaagtaacccagaaaaaataaagctactattttttgcaccattgttgtacaagaaaaagccaaaaaagagattgtaattagcaacaaagcggttattaagtaaaagccaacttcatttttaaacagccaattgatctttaaggctcgcaaaagttttttctcctattcctgatacctgcattaaatcttctatctttttaaaagaaccattttgttcacgataagcaataatctgttctgcctttttttgaccaattccagttaacttttgtagttccgttacattagcagtatttaagttgatcttagtgccatccccttgattacttgggctactgctactagtactcccactattttgactattatcagctgatcctgcagttgccacattttcaaccttttcacccttgtaaggaatatgaattttatcttgatccttaagcaaagtagcgcggttaatagcttttaattgtgctctagcagtagtacctccagccgcctcaattaactcctgcagacgagcaccatttttcaatgtatatactccctgatgcttcaccgcaccggaaatatcacaagttacagtcttagaaacggttgttgaactactgctagtcactgcattagtattagtggttgcacctgaactactagtgctagactgcataacttgatcctgcactgcagcagcattttcttgatgatcccctttcttcaatccataaaatccaactacaagaattattgcaccaatgagatatgcttttttctcaagcacaaattcttttactttttcaaaattcataaaaatcacctctactatttattacgcaaaaaaagcccagaattttttctagacttcaaattttttgaatttttttagtagtgtgtctttagatagtttaatgcatcatcaaaagtgctcacagggacaattttcattttggtgtgaattttctttgcggttctcttagcaaccgcataattagtttcacttttcttcacactggttgaatcagtcggcgcaaagaagacctctgcaccttctctgctagcagctaccacttttttatcaacaccaccaatgattcctacttttccggtaggtgaaatcgtacctgttcccgcaatcttatgtcccttacttaagttctgcttggtaaagacctcatagctttcaagtgtaaacatcaatccggctgaggggccaccgatttcgccagcattaatttttaacttaggcttagttttcacaactacatgctcaactaattgaatcccaattcctggcttattagtaccctttactttaacaattttgccagtaaagtgtttctcttgcttaccacgcaaaactgagattgttactcgtgcaccaatcttttgtttacgcaaataatccatcatctcttcagttgagctgaaacgatgcccgtttgcgcctaaaacggtatcaccaatttggagcttatttttaaaactagaatttttctggacttccattacataaacgcctagatattttaagctatgctggttacctgcttttttagctgcataataaattgcattctgctgacttgtttccatataccagttttgcaactcattatattgagcactagtttgacctcctagcagctccttgcttgatacacgctcatcatacggacgagtaaaactccatagatattgcaaaaccggagccggccgactagttatgctaactgtcaccaaataaaaattattcggacgtttatttgatgacttaataaactggcccacgggcattgcctcaccaggatattcaatataataatcggtcggccaaacagcaagtaccactaataaaacaagcgcaattagtgccaagagccaattacgcaagtgctttttcgattgattgtttttcttattattcatgttttagcttctctctcaatgcaatcgctgcttttttaggtaaaaacagactaacatcttcatcaaaacgagctaattccttaatcatgcttgaagctacaaaagaattttctggactcgtaaaaagcaaaactgtattcacatctggagccaattttttattaatcccagcaatctcctgttcatagcggaaatcagcactgttgcgtacaccgcgcaccataactttagcatgcaattcatgtgctaaatttacagttacttcttccggtctttctagcacttcaatattaggtatttcccttagtgcatccctgattagatcagcacgttcttcaggcgtaaacaagtatttcttagctgtattggtcatcgcaactacatatactttatcaaaaatttcagcagcctttttagcggtctccacatgcccattagtaatcggatcaaaactccctggaaataaagcgattgtcattattagtcctttcgataaatcctcacaattgtttttcctaaatggtgttctttgatcaatgaaaaaccagtaatttcacccagttctgtatgatcatcagtttctgctaccacaattgcatgatcattaagtaggttcgactttaccatctgcaacatgtccttagcgattttttctttggcatagggcggatcaagaaaaactagatcaaacttttcatcattctcagaaaataattttaatgctgcagagctgcgcatattataaacattaaaacgctgctcttccttagttaaagcaacatttttcttaataattgtacaagcagcatgattaatatcaaccagactcgcatggtcacagccccttgaaacagcttcaattcctaaggcaccactaccagcatataagtctaaaacattaccaccctgaaaaaattgtcccaatgaattaaaaagggattctttcaccttatcactggttggtcttgtccgattacttttcaaagtaaataaatttcttttagcatatttccctgaaataattctcattttagttgattctcacttttttcttgttcaagttgcaatttcttttctgctttttgggccatctcagctaattgattttcaatatgttggctatccaaatttacttcttcttcagctgaaatttcgacatgattaacaaaatccaaatgagcaatttgtcctttgatttcattgcattcgttgcgattaacataaagaacacaatatttcatttttttagaaaaataaacaatgtcaccaaaatggcgcaacttatattgatcactaactgattttaaataaataatcaatgctacccttttaattaagtgggtactttcaatttctttattgatactcatgcaactgtttcatccttttcctgtaacattttttcatttgctgaaacgttcagtactaaaccaatcgcagcagtcaagacaatcattgatgaaccaccatatgaaataaatggcagcgtaacccccgtaatcggcaacaatcctagtactgcaccgatattaaagaatgcttctgtaaaaataatagtcgtcacgccaaagcaaattaatgcgtcgaattgagaaaccgcgtgaaccccaacttccataatctgccacatcaaataaaagagtaatccaaccaataaaattgtcagaatcacacctacttcttctgctgtaatggataaaataaagtcggtatacggctctggtaagtaacctcgcttttgcatactattacctagtcctacgccaaataatcccccattgtggattgcataataggagttaactagctgggccccacctttttgctctaattcaaagggatgcaagaacgacattagtcgttggaattgataacttctttgtaaaaatccaggattccaggcaactacaataaaaaatacagctgtcactaagatcacaatcccagctaaccaagttaaagctaatttagttggaacccctgatactgaaaacattactaaagtgatcataaataaaattgctgtcccaccaaaatcaggttcaacaataaccaaacacattaaaaaagccgccaaaattgctgggtgtgacaaattatgtttgatcttacccttgactaattttccatctcttctgtctagtacatatgacaaataaatgaccagagccaatttagtaacttctagtggctgcaaattgataaagcccaagttaatccaacctacagcaccattaactgccgcactactgccatgagcaaaacgtagaaatactagccatcctaacataagtatacaaattaataaaaatccccctacaaactttggatttttaaatactttgattcttaatgcaaaaaacggaatcccaaacaaaaagaaagctactatagcatagattgcttgccgtatcccatagacatttggcttaaatccattaactaataaaatatctgaactagctgaatataccaaaattatcccaaccactactaaaataagatagggaataaaaatctggtaattaagataacgtaattttcgacgcacaagcgttgcccctttatctaaataatacttttttcattataaaacaaaaagatcatcacttctatcaagtgacgaccttttaaaatttattaaactatcttagttagcacggttacgcttcttatcagccttttgacgttctgaagtgttcaaaatcttcttacgtaaacgaatagattcgggagttacttcacaatattcatcatcatttaagaattcgatagcttcttcaagagtcaacgttctaggagtcttaatagcagcagcgtggtccttaccggcagcacgagtgttagttaagttcttacccttagttacgttaacagcaatatcacgttcacgtgatgattgtccaacaatcataccttcgtaaacttcaacaccagcaccgatgaataactcaccacgttgttctactgattgaagtgagtaagtagttgattgaccttggttaatggataccaatgcaccattacgacgacctgggttccagttctttactactggcttatatgcttcaaaggtgtggttcatgataccatatccaccagtttgtgacatgaattcattattgtaaccaatcaaaccacgtgatggaactaaaaattcaagacgagtttgaccattaccagttgattccatattcttcatctcaccttttctttgtgaaagtgagtcaataacagaaccaacatattcatctggagtatcgatttgtactgattcaaatggttcgcacatagtaccatcaatttcacggtaaataaccttaggacgtgaaagttgtaattcgaagccttcacgacgaagttcttcaaccaaaattgaaaggtgaagttcaccacgacctgaaacagtccaagcgttcaattgatcagttggttcaaccttcaaagaaacatcggtacgagtttgacgaatcaaacgatcttcaagcttcttaggagttacttgatcaccttcacgacctgcaaatggtgaatcgttggcaacaaagtccatttgaagagttggtggatcaatcttaagaagtggcaatgcttctggatgttcagctgatgcaatagtttcacccacgtagatatcattaataccactaatggcaataatatctccagccttagcttccttaatttcgttacgtttcaagccaaagtaaccaaataacttagtaacacggaagttttgagttgaaccatcacgcttcataacagtgatgttgtcactaactttaaccttaccacggtaaattctaccaacaccgatacgaccaacatagtcatcccaatcaagcatggtgatttggaattgtaatggctcatcagagttgtctactggagcaggaatattcttaataatggtatcaaagattggatccatagtttccttttgagtacttggatctggatcatatgatgaagtaccattcaaagctgatgcataaacaactgggaagtcaagctgttcatcgttggcacctaattcgatgaaaagttcaagtacatcatccaaaaccttcttaggacgagcgcctggacggtcaatcttgtttaaaacaacgataggttttacgccagcttccaaagctttctttaaaacgaaacgagtctgtggcattggaccttcataggcatcaaccaaaagcaatgcaccgtcaaccatgtgcataacacgttctacttccccaccaaagtcagcgtgacctggtgtatccaagatgttgatagtagtatccttatacttaacagcagtgttcttagacaaaatagtaataccgcgttcacgttcaatggcatttgagtccatagcacgatcttccagattcatgtgttctggcaaagtatcagattgcttcaataattggttaaccaaggtagtcttaccgtggtcaacgtgggcaatgatcgcaatgtttcttagatcgtctcttcttttttctgacaaaagtattcctccccactcttcaataaaaaaactgtgactctgtcacagtttcggtaacgcattagcgccttatcgaagtgcttttcttaaatctgtatagttacgttagtgaattttaccacctaactgcatacgggtcaacgcttaacaatcaagttaaccctggatttttttatgcaaaaacaagcaaaaactattaaactatggtaaaaatataatgtagataataatttttaaaaaggagtaattattttgatcttaatgaaagatatcgtacgtgacggtgatcccgtcttacgtcaagttgccaagcctttaacatttccatttagtgatcactataaaaaattagctgatgatatgatgcaatacttaattgattcacaagatcctaagattgctgaaaagcaccaattaagagcaggcgttggcctagccgcacctcaagtaggtgaaggtgtacaaatggctgcacttttagttcctgatgatcaaggcaaaattatctttaaagaagtttatgttaacccagagattgtctctgaatctgttcgtcaagcttgtcttagcgaaggtgaaggttgccttagtgttgatgaagttattaatggttacgttccccgccctgataaattaaccattcattactacaccgttgacggtgaagaaaaaaccattcgcttaaaggattacccagcaattgtttcttctcatgaaattgatcacttaaatggtcacttgttctatgaccgcattaataagcaggatccattcgcacttaaagaagatacagtcgtaatttcttaattgttatttaaccaaaacaaaagcctgcagatgcaggcttttttgtataaaaaaagtcactggttaactaggccagtgactcatacattgggaattaagaagattgaagagacttcttataacgagcaaatgaatttattaatcatttactacatgattatcgtacaactgatgttattttacgtcaataacattgaccaaatttaatcggtaaaaatcaaaagaaacataattatatacttaactttataattatgataaaatttttatagctattgagtaatttttactctacattgaacgtttatacattaataaggagaatcatttatgatttacaaagttttgtatcaaaaagacaagattgtcaatcctcgtagagaaactacacaaactctttatatggaagcagacaacatggtcgaagcaagaagtatggttgaggacagtaccccctataacattgaactcatccaagaattaactggtaattcgttaacttacgaaaaagaacatgctgactttaagttaacaacgttcgacaagaagtaataaagagtgcgaattaaaaataatgaagtagccgtttatgcaatcggggggttgcatgaaatcggcaaaaatatgtattgtgttcagtatcaggatgaaattatcatcatggactgtggtattaaattccccgaagataacctattaggtattaattacgttatttcagactattcttacctaatcaagaatcgtaagaaaatcaaagctcttgtggttagtcacggacatgaagaccatatcggtggtattccatttttgttagaaaaaattcctgaaattcctgtctatgcgacaccatttgccctttcattaattagaggcaaattggaagaacacggaattttaaagacaactgaactacacgaagagcatgaggatactgttttgaagtttaagaaactttccgtttctttctttagaactactcactctattcctgatactttaggtattgccgttcatacaccactcggtgccgttgtctttactggtgactttaagtttgacttaacaccagtaatggatcaacctgcaccagattttcaaaagatggctcaattaggcaatgaaggtgtacttgctcttctctcagattcaactaatgctgaagtaacacaatttactaagtctgaacgatttgtagctaagtcactacataatatcatcactggaatccacggtagaattatttttgccacttttgcatctaatctttatcgtgtatcaactgctattcaagctgcaattgataccggtagaaaggttgcaatttttggacgtagtatggaaaatggcgttgataatggggtcgacttgggctacttaaatttgcctaaggatctaattgttgacgcagatgagatcaacaaactaccacctgaaaaagtaatgattttatgtactggttctcaaggtgaaccattagccgctttatcgcgaattgctaatggtactcaccgtcaaatcagcttacaacctggtgatacagtcatcttctcctctaacccaattccaggtaacacattaagtgttaaccacttaattaataagttaatggaaggcggagccgatgttattcacggaagagtaaataacgttcatacttccggacacggcggccaagaagagttaaagatgatggttcgcttagttaagcctaagtacatgattcctgttcatggtgagtacagaatgcaggttattcacacccagcttgctcaacaagccggtgtacccgctgaaaacacttttgttttatctaatggtgaagttgtctgctttggccctgatggcgctagaatcacaggacatattcctgcaggtgacgtttacgttgatacttctggtactgcagatgttggcaacgttgttgttcatgatcgtcaaattctttctgaagaaggtttagttgttgcagttgctacagttgattataagcacaagcgagtcttagctggtcctgatattctcagtcgcggatttgtctacatgcgtgaatcaactgagttaattagtcaagcgcaaaagcatgtttatcatgtgcttagaaatgaaatggctaaatcaaatagaccaaaagaaagtgacattaaaaaggcgatcaccgaaaatctttcagacttcttgtattccaagactgaacgacggcctatgattttaccaatcattatcgaaaagaaatagtaaaaaagactccttagggagtcttttattttagaaaatgaataatatgcataaaaaaattaaagttcagttattagttaatgaggtcgctgggaatggcaatgctattaaagctgataaagaattacaagatatactaaaagaaatgaatacgcgtggtgctagttaaatcgttctagacaataagccaaattataagctaaaattgcaatttccaaccggctttgaaagcctatcagactacgtgctcgattgttctcggcattgtaataggtcagaagcgaaaagtcgctttcaattgttctgcgaatagccatcaattgatgatcattgtgctttttagctcctgtcatatttttacgatatggtgtccaaagttcgtaacccatttgttttagctgttgatgcagttctttgcctaaatagccttcgtcgccaagaagatagtaattagatggatgggtattttctatcagttcaactgtctccctggcatcatgaactgatgcctttgttacgacataatcaagaatgtaaccgtcatcgctaacaatggcatgaactttgaaaccatagaagtaaattttcttggtggccttataaccaatgttggcataaccgcgaaaaattttagcacgatagtttcgaattggttggcaaacaggtaccggaaagctgtcaatgatcaagaactgtccattcaggtcaacctttttattcatttcttgccgtatctgataaatcaattgcaatagctgacgtgaacgccgattaaaacgtgagtgtgataaacaattgaaacattcacagaatcttctttgtgattcaattcctgtcttagcttgccagataagtaaagccaaaatcagactgtccgtagttttaatttgatcaatatttcgccgatgagtaaactcagccggtgcatacaaacgataccagtgccgacaaattatcactaaatctttaaaactaacttgtaaatggtggctaaaacgcttaagcttaaggcagttcaatcagatcagactcttttctattattactatttacaagtcgagtctaacaagattggacttttttattaactaaaacgatttaactagcaccacgcgtaaatgaatattccttttaagcgacaaaaaagtcattatcctggagaattagtcgttctagcacaaaattacgctaatttacatctctcttctgaacatgttttaatcgtagttggtggagatggctcctttaatgaagttttaaatggaataaagacttctaattatcctgagacagctattacttatttgcctgcaggaacaggcaacgattttgcccgtggtgctggattaaccgcagatcccaggcaattaatcaacaatttgctccgagatcctgaaccggaacaagttgattgtggttttttcacatcaaatattaaacaaattcctaagggttactttgttaataatttcggtattggttttgatgcctttgttgttcatcagagtaatcatgagcaattaaaaaaacacctcaatcacctcaattctggaaatatgatttatggcctaaatataatcaaggcactaattaagcaggatacctttacagtgactgttaaaactaaaaacgaaactcttcgttacggagatgcatactttgtcactactactaaccatccctactttggcggtggttttgctattttgccaaaagcggacatttacagtcaccatcttgatacagtaattgttgaaaaaccgagtttacgcaagtttctctggctttttggtaagctgatcaaagatggttcacacgttaatgcaccagaatttcattatattgaagctaaagaaatcctagttcaaaccaataaaagtgaatatgctcaaattgatggtgaagatattgaaaagcagcccttcaaagtaacatttaaagttgatcattttaatttattaaaataaggaagaattccaaattcttccttttttatatcttatctaaaatatctcttttcgaattatgattttgataatattggtcctgatcaacgaaatcatgtacttgatcataaaatttcttccaataacggtatttttgatactgcttttgccactcccgtgcttcctgcaagtaattaccaagaagtccattaatctgatcgatatgtttaatcacctgattagcatgatacaattgctcttccacctgcttttgagttaacgttgactcctgatcttcaaaaaatagaacattttcttgataatttttttcttcttgcaattgtttactattgtccatttcttctttgatagctgcaatttcgtctggctgtaatccaattccagttttagctttgactaataacgactgaatatctgccaattgcacaacatctatttccattttttgataacggttcgaatcagtcaatgtgaactcatcatctgttctacttacaaatacaaccacgtttctgattaattgatctatatttggcaagcgtctcaataaattaataatcactgggttgttgcttttttctaggacatatttaatactttctttatgcttggccacttgatcggctatctgatcataatcagcctgcacattatactgtccatttttacttgttcgtgctttggtttccaagcaaaaaatcccgctagtcgtaattatcacatgatcaatttggttactccctaaactattctttttttcatagggatatggtaacagtaaattatgaattatttctttccctgtctgcacttcacgtaaacgagaattcactaattcttctgcggcagcgcctgccaagagattgctaagatggcgcaaatcacgttgagataaaatattcataggtcgcaaatgttttatttgattcaaatgtagttcagtcattcttttctgaaatgcgtttactttttgattgtaaaccttatagccagaattaattgcccgaattcgtaaaacattttgcagagccaaagctcgtttcaaatcacgtttattattcaacaaagttttttcaactatcatagcatcatgaacagtttgtgaatcagttacttttttatgtgtaatccaagctttttgataactagcatgattttctaactcattcacatactgatttaagtcattttccaaaggcaaaattttgtttctaccttctttgactattgagccataatagcgcaaattttttgtaatttcgtctaactcattgaattcatgtttgccataatggtaagttaccttagtttctccattccaactagtcttacgccaataatgaccatccgtctcaccaaattcaactaattccgccactgaacgatctaaatagtacttaatcaaataatgacaatggcctttattgtcaaaaatgcgtcgcttaatataacccggtcgcattaattcaatgatctgaaaggtcaagttcttatgattaggaaaacggtatggtaatcttttgcctgcaattttttcaattttagttatttctttcttatctgttacagataattctatttttttcattttcttcttttttcgcttttgaaaaaaataataggttaataagcctattgttagtgtaattattgtaatatccatgttaattatccatattttggaacgtatgtttagacaacaataattataccatgattttgtataatgaaaaagccccttgttttaacaattcaaggggcttttatccttataatttgatattttccattccaatcattggatcaatttcaccagaatatattttttccgaggttagaacaaaatcttctgctacttctgctttatcggtttcattctccatttcttgagctttttcgtgctgcttgctttgatcagatttatccaatgattttgtaatacccaattgctgacaaatcttcgctgctaagccagtcttacgatcatttcccggcgtcttaaaagctgccacaaatgcccgtggatcaccaactaatactaagtttttctcagctcgcgttattgcagtatacaaaaggtttcgttttagcatcacaaaattctgcatggttagattcaagatcaccaatggaaattctgaaccttgtgatttatgaatagtgattgcataagcccgggtcagatcatttaaatcttttctagaaaaggcaacttctcttccatcaaaatctgcaatcatgcattccttggcatcatcttcatcaatgctaatgatcttaccaatttgtccattataaatatctttttcaggattattttgcaattgcagaatacgatcgccaattcggaaaacttcattatgtgcttctaataccttacttttaggctgagatgggtttaaaattgcctgaataacattattaagattagttacaccaccattgccaagatacatcgcgctaagcacttgaatatcatcttttgcaaatccacgttttaaagcaagtttaacaatttgtccaactgcatcccctactaattcgggacgacagctaataaaagaataattatttgttttcttaaacaatgcttgctgatctttaccctcattaacatcatgcgccaaagtaataatcgttgaatcatcaccctgtctatgaatctgcttcaaaatagtagttggaaacgcttgcgatttaatcaggtcactgaagacattgccagctccaaccgaaggtaactgatccttatcaccaacgaaaacaatatgccgcgtatcatgaatacttgccaaaagttgtttaaaaaggaacatgtcaaccatcgacatttcatcaacaattaagatttcaccatttaactcattcaagtcctgagtgttagtatcaccaatacctaaccccaacattcggtgaattgttttagcactgattccggtaatttcacccattcttttagctgcacgtccagtcggtgctgctagtaaaaacggaggatcttcactgtaaagagcggaggaaggaatctcagccagcttgcgtaatactaataaaattccattaatgatagtagttttacctgtacctggtccacctgtcaaaatagaaatcggttggttaactgcgtttttgatggccaacttctgtgtatcgtcgtagtgaatcttaagttccttttcagcatccttgattgcttgctctacctttttatcatcatattgttctctttttttatcttcttttttttctaccaagtttttcatcaagcgagcaatatcaacttctgtttgataaatattttgtagagcagcattctcaccatcaactattactttgccagcttcttgtaaactattaatacagctagcaattgggtcgaattgattgatttgaagcaatttacttgcttctgttaataactcagctaagcctacataagtatctccctcaccatttaaagcatcgagtaatacttgataaacagcacctttaattctacgtggatcatcactagcaatatctaattggcttcccatcatatccgcggttttaaatgcaaaacccgaaatatcattaactgctgcataaggatctttctctagttttgctaatgcttcaccatgataaagctggtaaacccgtcctgcaatacgcttattaatgccgtatttagccaattttaaaattacttctgaataagaatccatcgcatttagtcctgccaaaagactatccttttgctttctagttaaagaaagcttatcaatcttagctggactttccttcaatacatctaaggcatttagccctaattcatcaataatcgtagtcgcagcctttttaccaattccagggaacttattcgaactcaaatacttagttaaagatccctcttcatgtggcaatacttgcttatagttatttgctctaaactgcaagccaaatttttcatgcattactagtttaccctcgaagcgatagctactattaatttgaatatcgccaaaattccctgtcaccttaatatcgggacgagaataatcggataaagtgccgataatttcaacgtcaagaattttatacaagtctttactattttcaaaaacaatcccgttaaccttaccggtaaattcattcataatttttcttttccttgtcatttagcatcttcataattgaagcatactgattcattgcttgttgataatacttagcatccatctgcttagcttgagcaaaatatttttgagcctggtcacgatctttttctaatgtagtgacacctagtaaaaaataaactttcgcatttttcttattatcaggaattgccaaatacatttgctgagcctgttgattctcacccaaacttaaccaaatatcgcctagcaattcctgaattcgctcatcaatttttttgatcgtcaaagcataagctaaagctttttggccttgccctaattttaagtaagttagtgccttttgataaagagttaagtcatcattaggtatctgatctaataaagccagtgctttatcaaaatcgccttgcatgtaataacacactgccagattataatttaattcttgtggctctttaaccagatgctgggcctgctccaatagcttctgtgcttgatccaagcttccttgctcaattaaatacgtcgatagctgcaaataattagcaacttgttgtggatgctgatcgatttttttgattaaaagatgaatggcttgttctactttaccttcatcataaagttgcgctattttttgatccattataacgagtccgtcttcgataatttacgtcctaaataactagtttcattccacactaccggtttaaaagtctttccgccatctagtgtttctaagacagttaaagaggtattgctaaggccgccatttttgcgaatatctttcaatggatagcctaaaagtccacccataatagctgataatgccgcaccatgactaactgctagaatcttatcatcatcgtcaggaaatctttgtgccatttcttgagcaaatgcttttccacgagcaataacatgtggataatcctcaccatgaagttcagtcggatcatatttatctggatggtgccaaaaattatccatttgtttagggaattttttctctgcatccccaaacttcattccctccatatcgcccaaattaaactctctgagtcgttcatcgatcacaacaggtaagttagcgttcattgcatcatcgatgccctgagcggtattaaaggcccgatcaagcggactggcaaaaattcctctaaatttagttccttgcaagtgatgacctaatttttttatatcttctaagctttgtggcaaaagtggtgaatctccatgtcctccttggaagcgactagctaaattccactcagttttgccatgacgaacaaaataaatttgcattgcttaaatccccctaattgtctaatcaataagaatagtttagcacaaagaaaaaggcgttcgaaaaatcgaacgctctttttgcatattttttaaactaattgtaattgcttttcttcttggtaagcagcatcaatattaccgccacctaaacattcttcacccttgtataaaacaagtgcttgacctggtgtaactgcacgagctggctcatcaaagtaaacatcagcagtattgtctgcggcatgatacttaacagtcacgccgatatcacattgacgataacggaactttgcagtacagtgcatctcaaaatcatgatctggcttaccagtaaagaatgacatatcacttgcattcaagcgactagcatatagaagtggactatcatagccctgctctacaattaattcattcttcttaagatccttgccgaccacgaaccatggatcagttgattccttagttgagcccaagcccaagccctgtctttgaccaatggtgtagtacattaaaccagcatgctcaccaactaccttaccatcaggagtgaccatcttacctgatttagctggtaagaattcacttaaaaactttctaaagtttctctcaccaataaagcagatacctgtagaatcttttttcttcgcggtagctaaaccattagccaaagcaatctctctaacttgtggcttagttaggttagctagagggaaaataaccttactaatctgctcttgactcaattggctcaaaaagtacgtctggtccttgttaccatccttaggacgcatcatatgagtaacaccattggtatccttaacagtcttagcatagtgccccattgcaatgtagtcagcatccaagtccatcgcaaactccaagaacgacttgaacttaatctgactattgcacattacatcaggattaggggttcttcccttcttgtattcatccaagaaatattcaaaaacgcggtgccaatactctttttcaaaattaattgaataatatggaataccaatcttatcggcaaccttttttacatcttcatagtcttcagtagctgtacagacgcctgaatcatcggtatcatcccaattcttcataaagacaccaacaacatcgtagccttgttgtttaagtaaaagtgctgaaacagacgagtcaacgccaccactcatacctacaactactctagtcttgctattgtcaaccattattcaatcaatcctttacttcaagcaaaatcttacgctcctcaagatcctttaaaatataatctaaaagttctacagtaggagctaattgcttatttttaaaaatattaaccttctgcaaaccgttgcgatcagtaataaccatagttaaatgcgacaagtccttattaatggtcatctttaacttagtaggcgcgttataaggtgaatcattgtaaagaggatgttcataattaaaattacccttagctgtcttcacaaagccagcatcaatcaaagcataaagcttcaactcaagattcaaagtaaacttacgtttatcaccattaatcacaactgtatttgccataattttcctcacttatttataataagatgctttctttttgaaagcaactatttatttttagattgaattctttgtacaatttttactaattcttgagcgaattgctcaatttcttcatccgtattataacgcccaaatgaaattcggatcgactcatttattcttggtgaattttctccaaaacaagcaattaaaacatgtgatggctccaaagaaccagcagtacatgctgaaccgcctgacacggcaaatccattcaaatcaagatttgtttgtaaagaagtagtagatacaccattgagatgcagattaagcacatgatgtgagtaacccggaccatacccaccattaatttcataattaatttgatgatcgtctaattcctttaaaataatgtcttgataatgagcatatttcttttgcaaagcatcacgaccaatctcggatacttcacggacagcttcgccaaagccggcaattcctggtacgttctctgttccagctcgacgtttggtttcctgctcaccgcctaaaatcaaatttggaatatcgatatccgcattttcatataaaaagcctaaaaacttaggtccattaattttatgtgcagaaacagacagaaaatcaatgttcatgtccttaacatcaattttaattgtgcccattccctgaacattgtcaacatgaaaatatgcattggagtcctttaccattgccccgatttctttgagcggcataatggtaccaacttcattgttaacggccataatcgatactaaaatagtgtctggcgttaattccttttttaactgttctaaagaaatttgcccgttttcatcgacattcaaatagacaatgttgtagccctcattttccaaacgtttcattggattaagaaccgagggatgttcgatcggcgtagtaataatctttttaccaatatttttacgagcataggcagttccaagaatcgctgtattattgctttctgaaccacctgaagtaaaaataatctctccatcttgagcattaatatcttgagcaatctggtgacgagctcgatcaattacatttctggccctacgacctaattcataggtactagaggcattaccaaaatcatttttcatttcatcggtaataatatcaattaccttgggtgacattggtgtcgttgccgcattatctaaataaatttcacgcacgtttaattcatcttttctacataatcactaattaacttagctgccttagcgccgacttccttgacaaacttgtcaaaatcattgtctgcattagcatccccattatcggaaattgcacgcatagcaaccaacggagttttaaaatgacgagcaacttgtgcaaaagcggctccttccatttctactcctaaagcttctggaaagtttttcttgattaactctttttgttcttctgattgaacaaaagtatctccagtaacaacaagcccttccttaaaatctacgtcttcttcacctaaatatttcttaaatgcttccctttcaggcgaattcaacttaaaggtagcaggctctcttggaatctgaccttctacatattcaccggcactaacacagtgagcatcgtgataggcaaaatcatttactaaaatcacatctttacgatgaacatcatcttgtaatgatccagcagaaccagtcataaaaattacatcaattttttctttagttagtaaactagtcagattcatagcggcattcactttaccgataccacttaaacctaaatatacatcattgccattaacagaaaaatgttcgaattctgttgatccgaacatttcttttgtttctgcatggaaatgatcacgataaaattcagcttcttccgccattgggacgataatcgcaatcttcaatttatttcctcatttccactataaatgaaatagtgctaatagcaccaatataattaaaacaatcactatcaggatagcacgattcaatctttttttcagtcttaaagacttctcttggcgaatcgtttccttatcactcgattgattatgctgataaaattcttgtccatccccagccagagggcgtcttctaggttcttcttcagagtcatcccgcttaaagtcaggatttacatctacttcttctgaatcattatcagaaaaggaagattttagcttattaagtaggctttttttctgccttttacgataatcagagcgtttttctaccataactaatccttattatcggtctgagcattacgcaacatcatattctcccaaacagtaattgcataaattgtctttgcatcaacaatttttccttcagccaataaagtttttaattcatctaagctataccaactagaagttaaaaattcatctgcatccagtgcccgcttatcagtcaatttagttaaggtatcacaatagaaaagatacatcttttcatcacaaaaaccaggagaagaatagaattcactgaccttttcccagtaatctgtgcgatagccaccttcttcattcagctcacgcttcattgcatcaagcggacttgcatcagtggaatcaaccaaaccagctggaatttccaaagtaatctgcttaattggttcccgccattgctttactaacaacatcttttgttcatcattaattgcaataacagccgatgcaggcttatgcttaataacttctctagttgcagtttcaccattaggaagcttaattgtacgaacagccagatccaaaatacgtccttgaaaaatctgctgtgacgagatttctgtttcctttaaatccaaaatcccagctcctttttaggctaaataaacatttacacattgcagaccatttttaccttgagctaactgatatttaactctttgacctacttgcaaagttttatagccttcctctttaattgctttatagaagacaaaatatgacttatgattacgatcatcttcaataaagccatagctactgccttcatcaaattgttttacagtacctaaccgcattagttttcaaatccttcttgaacagcttctgggtaatctgcttcaacgattttagcacaacgaccacaaagcattggcaactttggatctacgccaatatcagttctaatcatccgacaacgaggacatacttcgccttcagcatgttcaactactacactagcattattcaattgctttgcattatcaggtgcttcaccatcagcaatagttaacttagatacaattagaatttgtctgaaatcagcatccaagtcttggagcattgccttagtttccttatctgggtaaatagttactgttgcttcaaacgatttaccaattaacttcttatttcttgcatcttctagagccttcaagacgtcatcacgcaacttcatgaatttaccccaattttcaagcaaatcatcatggttagcatattcttcaacttctggcatattagcaagttgaacgtaatcttcaggttctttcaagaagccccagatttcttccatagtgtgtggcaaaattggtgttaagatcttagccaatttaacagcagcgtcgtaaataacagtttgcattgagcgacgatcatggctgttttcaccatcaatgtaaagtacatccttagcaaaatcaagataaaatgcagaaagatcattagaaacaaagttgaagaccttcttgaagacagtagtaaaatcaaacttgtcgtaagcagcaagacagtctttaactaagtcatttaatttcacttccatgtattgatcaactgaacgaagatcagcataagcaacgcgattttcttttggatcaaaatcactagtgttggccaacatgtaacggaaggtatttctgatcttacggtaactttctgcagactgctgcaaaattcccattgagactgcaacatcagaagtagtatcagcttgagctacccaaagacgaataatttcagcacccatcttcttaattacatcgtttggtgaaattacattgccaagtgacttagacatcttgtgtcccttatcatcaagcacaaagccttgtgataatacttctttataaggtgccttaccagttactgcaacagacgtaatcaaactcgaattgaaccaaccacggtattggtcactaccttcaagataaagatcagctggatagtgtaaaccatcacgtttttccattacgcctgaccaagatgaaccagagtcgaaccaaacatcaagaatatctttttctttagtaaactcgccatttggtgaatgttctgaagtaaagccttctggcaacagttccttagctgtatgagtgtaccaagcatttgaaccttctttttcaaagatcttggcaatatggtcaatcgtttctggagtaacaattggggtaccgtcttctgcatagaagatcggcaatggtacaccccaagcacgctgacgagaaattacccagtcgccacgatctttaatcatgttgtaaagacgagtcttcccccatgaaggaataaagttagcttgttcaatttgatccagaatttgatctctaaacttagaaattgaagcaaaccattgagtagttgctctgaagacaacgggcttcttagtacgccaatcatgtgggtatgagtgagtaaagaagcttaacttgagcaaagcgccagcctttttaagcttatctgctaccaccttgttagcatcatcatagaacattcctacaagatctggatctggaatatctttagtaaagcgaccttgtgcgtccattggactgaagaccgggataccatacttttgaccaacacggtagtcatcttcaccaaaaccagtagcgttgtgaactaagccggtaccgtcatcatcagtaacataggtgtcattcattaccaaaccatattggcctacaccagtcttaccataaaggggatgcttataagtcatcccatcaaaatcagtaccttttaattgtttaagtactttgtagtccttccagcctaagtcttctgcaatggctggcaaacgatctgaaccaattacatacttcttaccgtcaacttctactaaggagtagtcaaatcttggattaacggtaatacccacgttacttggaatagtccaaggagtagtagtccaaattactaatgaaacatctgaatctaagatacctttaccatctttaattggaaaagcaacataaattctaggtgatttaatatcatggtattctacttcagcttcagctaaagtggattcacttgaccatgaccagtaaactggcttcaagcccttataaatataaccttttttatacatttctccaaagacgcgaatttcttgtgcttcaaagtcatgttgcaaggtaatatatggattatcccaatctgccataacgcctagacgcttaaagtcggccatttgcttttgaacttgttcttcagcatattgtcgacaaagctcgcgatacttagcacgatccattgtcttacggtcaacgccttgcttagctaattgttgttcaactggaagaccatgagtatcccaacctggtacatatggtgcataataaccgttcatattcttgtagcgaacaatgatgtctttagaaatcttgttcaacgcatgtcccatatgaatattaccattagcaaatggagggccatcatgtaaatcaaaacgaggcttaccttcgtttaactttaatctttgttcatataacttgttatcttcccattctttttgccattcagcttcacgaacaggtagattaccgcgcatcttaaatttagttttacctaaattaagggtatctttgattctcattaacaaaattcctttctaaaaaagaaagcctcatcctaaaattaggacgaggctaaccgtggtaccacctaaattgaacttattataagttccacttaactttgcgtaacgtgcaaataccgtttagattaattaggcagctgatcagctcttaggctcttatgctagtcttccaccatcactagctcgctgaattgccttcaagctttactgtcaatctaatatgcttattttttatagtcgtcaggaaaaacaattgttgggcctaaaggatctgatttcatttcaggcttaacattaattgtttcatgacttggactgtccccggtcattggtttaggtgcagcattttcttcattatctgcatcgtcagaatcatccggttgatccaactccaaatcatcagggccttgagaagagtttacgtcattttcatcatcattgtcaacatcttcatcttcaacgtcttcatcatcagcacttactggctccgaaccatcatctggataataacgctctaagttgaagtaatcatccaatgcatgttgccacttttcatcattcaaattatcgatttcagtctgtagcatttcttgaatattactacgaaattcactaacttgctcttttacacgcatataatccgtagaaatagtatcttgttgatgcttttggaagttaatattatcttccgcttgctttttggcatccgcaataatctgcttagcctctgcttctgctttctctctaatttcatcagcagtttgttgtgccgaaattaatgatttatttaaagaacgctttttttcgttatattcattaacttgatcttgataatcatctactttttcttgtaaatcagttaactttttatttaaagaaactacttcattcttcaagtcaaccacttgatcaagtgtatcaccataatcatcaacaatctgatctaagaagctatctacttcaagacgatcatatccattacgaccacgccgtttaaattccttgttgtgaatatccatcggggtcaattgtgtttctttgtctgccaaagtctgagcaccaccttatatttaccttttcttgtagtcgaaacatcctcaatcaaaatccgaccaaagtgtcttaaactcaagacatcgtcttctttaatcattatattagaatctgctatttcatgccaatttaatttaaccagctgactattaatcatcttttgaatttgaccgcggctttgtctgctaatacccgataatacagcatcaattcgcattgaggcaactattttcgttttttcaatcgaatcatcctcaggaaccaaaacttctttgaagctaatcggtctcagctttacttttgctctgccaatgcggtcaatttgctcttcaaaaaattccgtcatttcttttttagtgaaaaactgccattttccttgattatcattaataatatcgccaaaaatacttgtatcaatacccgaattcgccaaggtgcctaaaataacactatgatttattttagtaaatttttgcggatattcaatttcatacggctgaatctgataatcactcggtcgcagattaagccattcttcacttaaataaactcgctttttctctgcattaggatagccaccatactcttgaacaaatgcatcattaccaacaattgttcttaaaattgctcgttttcccggatccaaaaaatcagtcaaaattggctcatgcttaaaaatcagctgattaaaaagaccagtaaaatagtcaattactggtctttcctcttgattaaaatgtgggtaaaacttacttgcctgtctgcgttccattacaccatcatcctcaataaaatatcaaatatccatcttaaaacatagttttgaatgaaatataagataaataaagcaataattggcgagacatcaattccagttgaataagctaatctcgcaaatggaccttttcgaaacaaatttaaatatggatttacaaccttgtctaaaaagcgaccaacaacagaattacttagcattggtagccaactcataattgcatcaatcacgatcagcagactataaagccataaaatccacgtcagtgccaagtagattaaatttaatatattaaccattagcttaaattgtctttcttatccactaaatcactaattttgccatcagtaacaaactttggtggagttgctaaaaagattttatcaccaatacgttggatttcaccatttaatgcatatacagtacccgtgatgaaatcaacaatccgacgtgctgaactgtcttccattctgctaaaattaatcactactgctttattatttaataaattttgtgcaacatccttagcatcggaatatacccgtggttcatataaaacaatcttgcttttagccgaattcaagcctgatttaattgaaaccacattatcgcgattaactgagttcagaggcaagtcttcattttcatttttagtctgtgaggcatattcttcgtcattttctaattcatcatcattagaaattccgaaaaatcttcctaatttatcaaaagccatttatactacctccaaaactagttttcactacgatgtttaaaaaatggaatatcactgttatcatcactatcgtcctgagcgctagtttcaatttgagaaatactatcctggtcttcatcactaaaagtatcaaaaccctcataatctttcttaggctcagtaggttgggtatttcttctttgattgtcttcgctatcatttagtccccaaacactggttggatcaaccatcgtttgcttaggctgctcaggttcttgtttttcggcagcaggctgaactgtttgtggtcgatcaactggttgcttaggttcttcagccttaggagcttcttctttttctttaactggttgagccttaatttgttggctacgacctggtaattgcttagaagcagcttcttcagccttagaatcaattccagtagcgattacagttactaccacctcatcgcccaagttaggattaattgaagtaccgaaaataatgtttacatcgtcaccagcagccttagaaacaatctctgaagcatcttgagcctcaaataatgtaaggtcaggtccaccagtaatgttaagtaacacttgcttagcaccatcaatagaaacttctaataatggtgaagaaatcgccagcttagtagcttcaactgttctattttcaccgctagcacggccaattcccattaaagctgcaccttgattttccattacagtcttcacatcagcaaagtccaagtttacgtagtcagttgaagtaatcaaatcagaaataccttgaacaccttgcttcaagacattatcagcttccttgaaggcatccatcataggagtcttcttgtcaaccatttcaagcaaacgattgttagctataataaccaaagtatcaacatattgctttagctgagtaataccttctgcagcgtttttagagcgcttagggccttcaaaactgaatggacgtgtaactacgcctacagttaatgcgcccgtctcacgcgcaatttttgccactacaggagccgcaccagtaccggtaccgccacccataccagcagtaataaagatcatatctgcacccttaagtgcatcttcaatcgtttgttcactctcttctgcagctttttgtcctacttcaggatgtgaaccagcacccaacccacgggtcaacttaggccctagttgaatcttgttttcagctttgttgctgttcaaagcctgaacatcagtgtttgctgcaataaaagaaacaccttgtacgccatcgtcaatcattcggttaacagcattgccgccggcaccaccaacaccaattactttgatgacagcattcttattgtcgtctgaatcgaatgtaaaatccattaaattaaccacctttaatcaaagaatttcttaaagaaactcttcaagctattagttttttcttgcttagtattattttcatcgtctggcacagattctgttctggcagacattttgcttctattataagcttctttagcttcactttcactattagaagtcgtacttttagaaatcttggtactttttggctgagaaacggggtcttccacagcgggttcaccaaaaccatagattacgccattaacaagatagtcaacttcagacatcttatatgaatagtggacgataccataagcagctgtataaatcggattacgcataccaatttgatctggttcataaattcgggccttaacatttaacccattagcagtcagactatcaattccttgtaataggctactaccacctgtaatcacaataccacctggttgcttcaatgcattatgcttaactaaaccttttcctaaacgagtcaaaatttgttctaagcgtgcattaataatttcactaagatatacttcgtcaaccatttgctgactatttgcaccaacactattaatagcaaatttatcgttttttgaggcaaattgtggatccgcaaatccatagtccaacttaatttgttcagcatcctttttcgaaatacttaaaacagcagagatatcattagtaatatcgcttccgccttctaaatcgatgttggcatacttaatttggccatctttaataacagttgccgtacttacgccaccaccaagatcgataattaccgaaccaaaagttttttcactttcattcaatgctacacttgaaattgctaaaggcgttggcacaaagaaattattatgataaccggctctttcaatagccttcttgatattgtgcaaaggactagtaggtgcagttaataaaattccactaacacccaaggaacgtgcaatcatttttcttggatcatcaacttcagttttaccatcaatcaaaaagcgactcggcaaaaatgtaattgcttcacgatcatccttagctgctgaatgaatcgcagatctaatcgttctttttacatcatcattatttacttcttgcccttgttcaccaacattagcaaaaccagttgcagtttccagttgtaacatccctaccggaattcctgtaactacactataaatcttggcgtttgttttttctgctacaccttttaatgcacgactaattgcactagcagtttgatcaatatctactatttgaccgtgtcgcattcctgaatttggcgttgtaactgcaccgataaccttaccagaatctgcaacaacggcttttgcacttgtggttcctatatctaaacccactaaaagatttgaattctccaaaattaagcccccattaatatttgccttgaaaaaattctaacataaataaacttgcaaaacagctacgatatgccataagctttcttttcactagaagttaatggtctactaaatgcacctatttctaaatcaataaggctatgtttaccagctttaattctaatagtatcataatattttagtttgctattcaaagtagcagtattgccaatcactacattaccgtccttcattactaaaataatttgtgaatttcgtctggtattcccacttaataattttacctgatttttaaatgaattaggtaaactgttaaataactttaaatcattttttaactcatctgatttattatagccaacaaaaataggtttatcttggttcacttttgtccaaggtagagctctcgtacctatttttccattatccaaaatctttcggtaagaataaccatcttttaagtaacccacggttttacgttcattaatttgtaaaatcaattgattaatatgacctaaatgaacttgtgcactttgaatttctggatatttttgggataatctttgactcaaatctttttgttgaaacaagtaatcaaaaactttatcgctagccttgatcttggataccttaacaatttctttagcaggtaaatgctctgcaccaattattttaacagtactgatattcgctaaaggtgaaatatagtatcctaaaccagctatcgccaaaactgaaaccgtcattatcagacctagcctacgtcgtaatgatcgtcgtctttctgcctgtaaatttgagagtgaggcagaaatcttggtctgcgattttcgactattcctttgttggttaaattcatgattcaagtacggagacaattctttccttggatcaatcttagttactggctttttggccatctgcctcacctacctcctagcgtgaaatttcttccatcaccttaatcacttgatcagatgcatcaggtacgcctaaagccttagaagctttgctcatttcagtagcatacttttcatcgagcaaaatatggtcaattgaagagacaaaattatttggatttaaatcatcttctggaataaccaatgctgcaccagctttttctaaatcaagcgcattcttcatttgatgattatgagttacattagggcttggaatcaaaataacgggtacacctaatgcagtaaattctgcaatacttgttgcaccagatcttgaaacaacacaagtcatttctggcaatagacctggcatgtttttaatgtatggcaaaactttaatattattaccaatatcaacattcttaattttttcttgtaccttatcaaaataaaaagtacctgttgcccaaataatttgatatggtttttgctttagcatcattaatgacttaagcataattctgttaattgctaatgctccacgggatccaccaaatactaaaacagttggcatttttggatttaatccccatgttttttcaagatcaattttttcttcgtgcaagcttaaaacttgttgtgaccgtggattacctgtcttaactagtttcttcttttctgagaattcctttgcagcatcatcaaatgtataacaaattttatccacataatgacccaaaaatttattagctaatccaaccactgaattagattcatgaatcattgttggaatatgcattttagctgcttcataaaccatagcaccgctaacgtaaccacctgtacctaaaatgacatctggtttaaagtcccgtaaaatttggcgtgcgcttttagtagcttgtaaaaatagcttgatagtctcaaagttttttaacggatgtttacggttaaagccttgaatcttaattgttttaaagttaacaccggctgctggaacaatttttgattccaatcctttttgtgtacctacaaataagatttcatcgtttttactaataccgcgttctttcaaacgttcaataattgccataattgggtaaatgtgaccgcctgtaccgccacctgtaaaaataactctcattttatttagtctttaattcctcaacaaatctaacaaagtaatcgccacgttcttcaaatgttctaaattgatcccaagaagcacatgctggtgagaacaatagtacatcgcctggttcaactaattcccaagcacgaggaacggcctcttgtagtgtattaacaattacaatgtccttaattcctgcttttctagctgcgtcagctaacaaatatctagtttcaccataaagaacaattgacttaacatgttttttaaataatggtaccaaatcatcaaaagtgaagccacggtctaacccaccagcaatcaatacttccggttgcttaaatgatggaatagctacagttgctgcttcaatattagttgacttagaatcattataaaccttgcagccatcaagtgttgttacatattgcaaacgatgcttagcgccagtaaaggtgctcaatactgcggcgatatcatcattatcagcgcccataattttagaaattgcaatagcgactaaactattttgcaaattatgaatacctggtaatttaatatcagaaatcttcataatcttttcgttttgactttcaagatattcatcgccaatgaaataatcagcattatgatctgtctcagaaaaagtttgcattttagctggtgaaacttctttttccttagccaaaatatctttttgatcataattagcaataaagtaatcattactgttttgcgttctagttacattcaactttgcattgacataattttcaaaagtcttgtgataatctaagtggacgttgttgtaaatatcaacgatcgctgcaactttaggatcaatatcagttacacccaaaagctggaaactagaaatttcaactactaaaatatcatccttagttgccttaggtacaacttcagaaatcggtacgccaatattaccaactgcataagcatgatgaccagatttttgcaaatgatggtccaaaattctttgtgtcagcattaccgtagtagtttttccatttgaaccagtcacacaaacatagggagcatcactacaacttaaggcaacttctggttcagtaataatcgggatattcaactcctcagctttttgaaccatcggattttcatagggaatacctggatttttaactaaataatcaaaatgttctttttcaagcaaatcaactggatgatgaccgccaattacgcgcacgccgcgacttttcaattcttgtgccttagcatttttctccaaatcagctttatcatttaaagttaaatttgctcctaattgcaaaaggagttcgctaacagcaaaaccacttttacccaagcctagaaccaaaatgtttttattattataagttttaatatccttcattttatgattatccccaaattactaaatacaaaatactgccaattaatccaactaaccagaagacaatatctactttccattctgaccaacccaacatttcaaagtggtgatggataggtgtcatcttaaaaatacgcttacccgtagtttggaaagaaattacttgtaaaattacactagcagtttcacaaacaaaaacaatcccaactaacaataatgaccagggacggttaagcataatactgattgttgctaaaccgccacctaaagcaagtgagccagcatcacccatgaaaattttagccggcttatggttaaaaataaagaaggcaattaaaccaccaattacactcatacaaaaggccaaaacagcaaaattcttttgtttgaatgcgatataggcatatgtaccatatgctacaactgataaacctgttgctaaaccatcaagaccatcggacaagttaacagcatttgaaaaaccaaccagccaaaaaataataaatgccacaaataaaactaagctatggacaaccccagcaaaaggaatatataacccaaattgaaaatgatcacttgtagcaatcaagacaattaaaattgcaattataatctgtaatgctaatttttgccatgcacgcaagcctaaattacgtttgaagtaaagcttaataccatcatcaaggaaaccgataataccgtagcctaagagactgattaccaaaatccaaacaactttattcaagctgtgctgcatagcagctacccaaataacagaaataactgctgcaattacaaaaacggtcccacccattgtaggtgtgccagactttttttgatgccatttaggaccttcatcacgaatttcttgtccttcgtgatgtgaccgcataaatttaatcaacaatggaataaagatcactgtcaaaaccagtgaactaactagggcaatacaacttgccaacatcatattcattctgagttactcctttaacttaatgtttaattttcttccagcttttaattctgttcctttagccacgctttgactcgcaacagtgccggtaccttttatgcttaacttaatatctgtcaaactagcaaattggtgtaaatcactataagtccatcccgtcatatcaggacaaatgatttttcctgaagtattgacaaaaatcttagacccagactctaacttttcgccactcttaactccttgattgctaatccgatcaccgctaccaattttaaccaaattaagtcctaattgcttagtttgactttcagcttgtgcaacggttttagcttttaagtttggtacttttacagtagttgatacatcatcatttttagcaatcgaaatgattctctgcatcatcggtttgaaaattgaagccaaaatcttttcagctccgcctccaattaagtgtggttgcttaattgtcaaataaatacagtaacgtggtttacttgctggataaataccaacaacagagaaaatataattactatcaccctttagataacctccacctttagggttagcaatctgcgcagtccccgtcttaacagcaatatcggcgtttcccatcttataagcagaaccagttcctgattgcttattaagtacctttctcatgttagccacaattacttttctggttttagcactatatactggagtaccaacttttttaatctgatagccttgaattgtattgccatcagagtcagtaattttattaaccaactgtggctttaccatttgaccattattagccaaagaactataagcttgcatcatttgcattacattcacagtaacgccttgaccaaaagcagtaattgcttggtcaactggtgttttaaacgaaatcatccccggctgctcacctggaagactgactcccgtcttttcaccaattctgaacttcctcaagtacttcttccaagtcttagcacccatcttttgttctaacttaacaaaaccagtgttacttgaacgttcaaaagcttgagaaaatggaattgtgccccaacctgaagtcagccagtcatggatagtcgaaccagcaatattaacagaaccagaccggtaatactcattagggttgtaattgccactgttgactactgcagcgaatgacaaaatcttgaaaactgatcctggttcataagtatcttggaccaagatatcccgatacgacttagttaatcccttcatagtttgaggattaaaagtagggcgttgagaagttgccaaaattttcccagtcttcatgtcttcaactgtagcagtaattgatgttggtcggtaagttttctgtacttcacttaagcgagtctcaagcaaactctgcaactgagaatctagtgttaaatacaagttgtttccatttttagcaggcttataaacctgattactatttggaagctgatattcagatgcatctaccgaagaaatccggtaaccatctgtcccagtcaaagtcttattgaaataggcttcaattcccatagttccgactaagttttgtgcattagtctttttattccaaattggttgagccaatccaacagtatgtgatgcaaaaacaccattgggatacaatctagatggtgtttccaagaacttaattcctggtaatttcattgcttcaatctttttcttttgccgcaatgtcagtccactaccacctgtcccaaattgtacctgaaagaccttctttttgggggttaaatattggtaaattttttccgcagacaatggtaaaacctgtgccagcttttcagctgtcttggttttattcactacatactcaggtttattcttatagttgatcgaagtcttatctaaaatcgcataaaccgtatacaaatgcgaatcttccgcaattgttaatccatttcgatcatagatagtccctcgcgtggccttaattacctgattgcgcttataaagctgcttggtacgctgtgataaattttgaccattaactgtcttggatattccgatatataaaaatctagccgtaaatacaagaaaaaccaaagccacggccatttggagaaatctccccaccgtaaagcggtagccgtgggctttggatttttgtaattttaaattactgttttttttcattaacgaatcgtcctaatatttttgttaattagagttaatcctttttcacgtgcaattttatttaaacgtgaagtagaggtcaactccccaatctcttgacgtaaatcggtaatcttattctgttccttagcaactgtttgttgagttctagtcaattcatgttgagccgaagttgcagaaatactagaagaaactagaaagatcatcatgcccaacgtaatgacgcttccaataatcatcaaagctttttctatgccactataaggaactttacgcggatcaaggataattcgttgtcgtctttgcgaaccatttctactacttggttcatattcaatttttcttgctgagctatcagccataacattttcctctttataacttctctgcaacccgtagttttgcactgtgtgagcggttgttgttctctaactcagaagtagaggctacaattggtttgtgatttaccaaacgtagcgttggcttcataccgtccggtataaatggcattcctcttggcacctcaacttctgaatacttcttaaaaatccttttaacgatcttgtcttcatgagactgaaacgtaattacactgattcgaccacctggacgcaatatcttaattgcttcctctagcgaagcttgtaaaacatcaagttcgtgattaacagcgacccgcaaagcttgaaaactcttctttgccgggtgccctccagtccttcgtgcatacgcaggaatcgcatctttaatcacatcaactaattcaaaagttgttgcaattggcttttcccgtcgtctttctacgattctgtgagcaatttgacgagaaaacttttcatcgccatattgatacaaaatatctgccagttctttttgacttaaagtattaactaactgataagcatctaagtcctgactttgatccatcctcatatctaatcgcgcatcataacgatatgaaaaaccgcgatctgcttgatcaaattgaggggaagatacacctaggtcatagtaaatgccatctattccatctgagtaacccagttttaccaggtccttttccagattactaaagttgtcatgtaccaattctaaccttggctcactatccagttgtaataaattcgcaaagttcaacttcgccgattttatcgcatattcatcttggtcaaaacctacaagcgtaccggtgtcaattttgctgagcaaatatttagcatgtccaccaccgccaaaagttgcatctacataaagaccaccgttttttggtttcaaattgtcgatagtttcgtgtaagagtacactggtgtgtttgaatttcatattttttatagttcaatgtcgtccaaattttcagcaatatcatcatagtcttcgttagcttcttcttcaaaactagtccaacgttcttttgaccaaatttcaattcgatcagagacaccaatgatgacacattctttaatgagtttggcatgcattttcaacgttgttgtcagattaacgcgaccttgcttatcaaactcacattccatcgcaccagagtagaataaacgcataaatttacgtgtattcctcttagtcaacggaagttttgctaatttagcttcaatcttcgaccactcctccatcgagtagccaaaaatgcagccttccattcctcgcgtgaatatcatcttgtcgccaatctgatcgcgaagtttcgctggtataatcaggcgacccttgctatcaagattgtggtgatattcacccatgaacatggtctagcccccttccactaaataatttaccacaattccccactctctaccacattcataagaaaaaaatacagatttttaaatttcttttttattgtgatttttcaaaataaaaaaaagtcacaaaatattgaaattttgcgacttaagcatatacaagtaattttattttataacactagcatcaataaaagtccgatataccagaaaacagtacaggcagtcaaataatcccataattttctaactgtttttcctaaagaaatatttttatttctaatcgcatcgttcagcgacacaacaatcactaatacaaaatagcataaaaaaccataaggtaaaaaagaaggtttattcatatgtaaagtaattaatccacaagctgaaagaaagaaaaatggcataacatcgtaccctctaaactgtgctttagggaaaattttattgataaaaaaagcaactactaagccaataattggaattaggaaaatataaagcataagtattcctccattctttttattctaaactataattgatttgaaaaaaaccgttaataagcataaaatattgttcaaataggagggctgtttatggcacgaaaaaagaaaaagaaatcaggttttcaaaaattaactattgcaatggcttggatcatggcaattattactttagcagctgttattgctcaagctgctatctcacttcaaagtttttaaggattaaaaagacgcgaaagaaaaaatcttccgcgtcttttttaaactcgataagcgtttaaatcaattaagaatggataatcctgagctaaattgccccaaatccaatacaagagaaaaaagaagacaactgcccaacctaaactgactaaaatgctcattaataatacgtgtgctgatgcagcactaatacccaccatattaaaaatgagccaactatacgcaacaaaaactgcagttcctaataaaacgacaattaatctagcccataacatttccggtaaaaaacgagctgttttttgacagatccagcaacttgcaggtaggaaaactgtataaacaccgataatgccataaaaatagatatcagcaacaattcctgcacctaatgctaaccaaatttcattatcattagtatcatcaaacagaccaatcaacattacactgattggcaaaatgacgcttgacgctgcaaagttgtcataagtcataaactgatgtaagtaaagtgcacatacaccgtctactaccaatgcaataaataagccaattgccaaaacccattttcgaaacgtagacattaattagccacctgtctttcaattacagttacaacagatggatcactaatatcacctgctggtttaattctaatctgatcagatagaccaaatgaatcacgagttgtcgtagtaactgtaccaattaacaagccttttggtgagttaccgcccataccactagtatatactctcgtgccggccttcagtttgcgaccatcaaccacctgtgtaaaggcaagataattattggaagtaactgtaataataccatgtactgtttttccattcgcagcatccgcttgaacagagaagcgattagccgactcatcagtagtagtaagtaattcaaccttggaagaagcagcatttgcttctacaattcgaccaataacaccgccatcgcacatgacagccatattctttttaattccagctgaacttcctttattaatcactaataaatctgaccatgtatcaggcgaccgagaaataacagaggcgttgaccatggtatagccacttaacgtatcttttaatttcaatgcagacttcaattgcctattttctttttcaagagctgaattgcgagccttcgtctggcctaaattagtaacttctcgctttagatgattgttttcttcttgcgtatttaaaatatcatgaacactatttaatccgcctgacacgagccctactggtacatcaacaattctagtacctaaagcaacgacatcgttacccaagctttgaatcagtaaaggtgtattgcgcctattgcgcaagctaacactcccacccaaaacggataaaataacaactactataataaatgctgataataactttttattttgcagaaattttttcattaagaattgatcctatagaaaaaccggcaacagccggcttttttattatttgcgacttctacgcattacttcaatattcttgagtgattcaccagtaccaattgctacacaatcaagtggatcttgagcaataaacacaggaaccttagttgcttcagaaataacttctggcaaattcttcaagagtgcaccaccaccggttaaaacaataccatgatcaataacatcggcagcaatttctggtgaagtttgttccaaagtctccttaatagctacgataatgtcttgaactacatcttgaatagccttggcaacatcaactgcttcaatatcaacagattttggtaaaccagttactaaatcacgaccacgaatattcattgattcaatttctttagccttttcaactgaagctgaaccaatttgaattttaatgtcttctgcagttctttcaccgattaataagttaaagtttgagtgaacatagttaacaatcgcattattaaacttatcaccggcttgacgaattgaagttgatgaaacgattccacctaatgaaattgtagcaacatcagtagtaccaccaccgatatcaacaaccattgaaccagtagggtccataactggaagaccagcaccgattgcagctgcaaatggttcttcaattacaaatgcttcacgagcacctgcaactctagctgcatcaattacggcacgcttttcaacttcagtaacacctgaaggaacacataccattactgaaggcttggaattaccaacagtcttttccataaaatatttaagcattgctgcagtagtatcgtaatcagcgattacaccgtccttcattggacgaatagctacaatgctgcctggtgttctaccaatcatttcttttgcttctgaaccaacggcgattacttcgcctgtttgtgtattctttgctactactgaaggttctctaagaacaatgcccttaccttccatataaacaagtgtattggctgtacctaaatcgataccaatattctttgtacctaatccaaacacaaaaatctctccttaactgttgcggtctctaaatcttgactaattatagcatactataactttaaaggcgcctttcacacaaattttaaagaactttaaaacaatttttctcacgcaaacttaaatattgaccttctcccacgataaaatggtctaagaaatcaattttcatcatttttgcagcttgacgtaaactttcagttaattccaagtcacttgcagatggcgttaatttaccactaggatgattatgagcaataaaaattccagagcagccataaataactgcccaccgaaaaatttcccgcggatgagcaattgatctattcaaagtcccttgaaatagtttcttctcagcaataatgtggttgctattgtcaatatacaatgcccacaattcttcctgcttgtgtcctatcagcttatcagctaaatacgtacctacttcaatgctagatgtcaaaattgtctttctcttaggtgaagcgcagcgcaaacgatctagtactgcctcagccgtaatagcaagttcatccgagcattctgaactggtaataaactttaatagatcattaaacgaatttaaccctgtgtttttcagaaaaacatttaagtcctgcaacgtatgaattcctttattttctagttgttcaaataattgtgtcaatagctctaaatctgttttgacaaagtaatgatttggttttctttttaacataaaatccccctcattacttattacgcaaaaaagagctaaatttttttcagaaattcaaaaaagttttgacaaatcatcgttgcattctgcttatctttaacagatggtgctttcaaatctggtaccatcacacattttaaccctgcattagcagctgcttgaacaccggttgatgaatcttcaaaaactaaaatattttctttaggtaaattcattttcttagctgcttctagataaatatctggtgccggcttagccttaatgtgacctctttgtacatcaagataactaagatgaaaatcaaaataatttctgattccagtcacccacatagcatgctgaactacattttcataattacttgaagcaatcgccatcttcaagccacgcttttcaaattcgtctaatgcttcttgaacaccaggttgcagctttaactttccctcatcagtccattgccacaccaagtcatcagttcgcttaataaaacgatcacggtctgcttcagttttaaaatatttatgataaaaatcctgcatctctttaactgtagcaccagttaacttgagataagcatcccgcggcgtgcccaaattctcttcttctgccgcctgaatattagcatcccaatacagcttctctgaattaactagcaaaccgtccatatcaaagataatgccttgaatatcatcatctagcccttgtacgcgcatcacgttttcctttccaatttaaaatagcactaaccaaataaaaggatccactaacaattaaaatatcattagctcccaagtgatctcgcagctgggtaaaagcagctcgataatctttttcataattatatcttttttgtacatcaattggaaaatcatcttttttagctactcgcggataagataaagttgtcagtaaaacttcatctttatcatcaaacaagctaaacacctgctcaagatccttatctttcatcatagtcactaaagcataaagcttgccatgcttttgctgggtcatacgatgaacgactgccagcaaattactcattgcctgaatattatgtgctccatctaaaatgattagcggattttctcgtaaaatttgatagcgccctggaataatcgtttgattaatcgctgtttcaacttcttcatttgataaaggcagtttcaacaaaaagaacgcctggcaggcaacggcaatatcataggcttcaacttgtggtcgtaaagcaaaaactagctttcttttgtgatcttgataaacaatttgattatcaagcaaaacactaaagtctcgtcctaattgataaactatcgcatgttcttcttcggctttacttttcaaaattggccaaacaacttctggcacgttacctaaaactactggtctttttgccttaataatgccgcttttctcacgtgcaatatcctgaattgtaggtccaataattttttcatgatcgagaccaattgtagtaataacacttacttctggcataattacattagtcttgtcatgttctccaccaattcctacctcgataacagcataatcacactttttttgagcaaaatagacgaaagccagtgcgacttcatattcaaaggttactaacgaaaaagttgagtcctgctgctgcaatttctcataagtaccctgcacaatattagctgttttaactaaatcctgatcactaatattttgattatttaactgtattctctcattaaattcatagacatacggtgagacaaaaaggccagtcttttgaccagccttttttagtaggtttgataaatagtatgaagttgaacctttaccattagtgcccgtaatgtgaatcgttttaactagatcttgaggattgcctaattccaacaataaccgcttaataaaagacaaattatttttaggatgtaaatgaggcaaagcatataagtaatcgattacttcttgagctttagtaaatttcaattatttactctctttcaaatcttgaattctttcacgaacaccggctaattgactttcgtagtcagccttcttttccttttccttgttgacaacagcttctggagcgtgaccaacaaagcctttgttagccagcttcttttcacaacgagcaacttcgtcttcaagacgcttttcttctttttccatcttttctagctcatcgtcaacattaacaagttcagttaatggaacaaaaatttgtgcgcctggaattacagcagtcttagctaattttggtgcttcaacttcactagctacagtcaattcctttggatgtaagaagttttcaacgtaatcagcattttcgtccaaaacgcgcttgttagcttcatcgtctaattgaatcatgatgtcgatttgacttgacattggtgcattaacttccatgcggatgttacgtactgctttaatagtttcaattaagaaggccatgtcttgatctgcttgcttgttttcaaattccttgtgagtagttggatattcagcaaccataactgacttaccttcatgtggcattgaaagccataatttttcagttacaaatggcataattgggtgaagcaaacgcaagatttggtcaagaatccaaattaagttttcttgctttcttgcctttaattcttcatcgtcaccattcaaagcaaccttagaaatttcaatataccagtcacagaagtcattccaaataaagttgtaagcttcacgaccagcttcaccgaattgatattcatcaaacaagcgagttacttcactaacagtatgattcaagcgatcgaaaatccaacgatctgataaatcaaatttagaagcatctggcatatgagctggtttagcatctgctggcaagttcatgattacaaaacgacttgcattccaaatcttgttaatgaagttccaagcagcagataatttcttaggatcataacgagtatcttgaccaggagcagtaccattaagcaagaaccaacgaagggcgtcggcaccgtatttatcaactacatccattgggtcaacaccgttaccaagtgatttactcatcttgcgaccttgttcatcacgcattaaaccgtgtaaaacaacatcattaaatggacgcttgccagtaaagtgcaaactttggaacatcattcttgatacccagaagaagataatatcgtaaccagttaccaaggcattagttgggaagtagcgcttaaagtcttccgcattagtatcaggccaacctaaagttgaaaatggccataatgcacttgagaaccaagtgtcaagtacgtctggatcttgttcccagttttcaatgtccttaggtgtttcttcacctacataagtttcaccagttttcttattgtaccaagctggaattcggtgcccccaccacaattgacgtgaaatacaccagtcgtgaacatcttccatccagtgatcaagagtttgttcaaatcgttctggaacaaagtttactttgccatcagtcttttgattttccaaaactttgtcagcaagtggcttcatcttaacaaaccattgcttagaaagacgtggttcaacttgaacgccagaacgttctgagtgacctactgagtgaacaattggttctatcttaatcaagtaaccttcttctttaagatccttaactaaggcttcacggcattcaaaacgatccataccagcatacttgccagcttcttcgttcatcgtaccatcatcgttcataacattgattctttcaagattatgacggttaccgacttggaagtcgttagggtcgtgagctggagtaatcttaactaaaccagttccgaattctggatcaacgtgttggtcttcgataattggaatgtgacgaccaacaagtggcaagatcaattctttgccaacaatatccttgtagcgcttatcaccaggtgctaccgcaacggcagtatcaccaaacatcgtttcaggacgagtagtagcaatttctacataacctgaaccatctgcaaatggatacttaatatggtaaaaggcacccttatcatctttgtgaataacttcgatatcacttaaagcggtttgaagtgctggatcccagttgatgatgtattcaccacgataaattaagccttcattgtaaagctgaacaaaaacctttttaacagctttagaaagacccttgtctaaagtaaatctctctcttgaataatcaagtgaaagccccatcttagcccattgacctttgatgattgatgcgtattcatctttccaatcccaaacctgtttaacaaaagcttcacgtcccatttggtgacggtctttgccttgtttacgcaattttgcttcgaccttagcttgggtagcaataccagcatggtccataccaggaaggtaaagagtatcatagccttgcatccgcttaaaacgaattaaagtatcttgaattgcagtatcccaagcgtgacccaagtgcaacttaccagttacatttggtggtggaataacaattgaatatgggtgagcttttttgttacctgatggcttaaataaatcttcatcaagccaggtttgatatctacctttttcaacctcgtttgggttgtatttaggtgctaaatctgtcataaaattcctccaataaaaaagtcctagacatattgtctaggacgatcagttaaaccgcggtaccacctacgttaagcatgtatcaaacatgcttctcttgaagacgataacggcgtataccggattaacctactttttattttcaattaatcagctaatcaagctactagtcaaccttcggcctctcagctgtctggcttttctctgttaataaagtcgacccctcttgattcttgctttggttatgattatagcatgaacttcactcagaaaaaagggttaggaattagtcgtaattaagttagccatatgtctttattcttttaataaatcagcaatacatttttccgatgaatgatattgcttatattgttttaacacgttgattaaatcatcatagtgactattccaaaaataataattttcatcataagatttcacactcttaagatcgttataatactgcttaacaaaatcactaggcttcactttacttttatagttatttgtatatcgctgatagtcttgatgataaagaatgtctagaatttcaatctcaggtctagtacgaagttctactacttcggatactttctttttatacacttctggaagattaaacttttcggttttggaatcaagtatcctataaattttaacctttctacttctaaaccctttattcaaaaattctttagcaaactttttagcatttcgtgctctaattacttcaccttcaagaagatcatcctcgttgaattttagtgcatcgtgttccaatagaacttccataattgctcgttcagtatgaccttctacaataatagcgattagatctgtagagttactcatccattttaaccgccttttctgtagccttctttaaagccatgtaggcatcataatctggagctgtcccacctaaataatctgattcaaaaacatcggctttatttagatcgcttcttacatcagcagttgaatatctttgaagctgaatcttgccttctctcttagtaatatattcttcatcagttctttcaattttatccaaaatttcagtatagtgcgtactaaataccaaagtagctctatttatgttgattttaggattagtaaaatactcaataaaagaatctacaatagcgtgattaaagtgattctccaactcatcaataaagatgatgccaccaacggaaagtgcattaattacctcgccataaagagttatccctttagctgtaccagaagacaagtattttgcaatcgttgtaaaatcattttctgcaatctctgtatctttccctttaaacttcagcttaaacaattgtttagtagcaccagagccctcaggcttgttttcaattttaagatattcaattgttggatctaaaaagtttaaaatttctccaggcacattgccagaaccatacatcaatgcattaaagtcagtaaagaacaaagtatcaaatggtatttgaggataatacttatttttcgaaataatcgctctaaaaatcgaatcatcagacgacaaaattgaagaagctaggtcgcctaattcttttctgtctaattctggttttatatttttgaaatcaaataattttttctttgaaagattaacagttaccttttttcgatataccgtttcagactcaatatgccagcttttacttaaagttttctttaacttgaaaactaaactatccttataaactacatgatcagttccataaaaataagttgtaacactaataggctcatttcctattagcacatccgttagcttagtttgatcaattgacttttccatcacaactgtttgaagaattcctatcaagagtttcatgatcgtagtctttccagtagcattagtccctactagagtgattaaattattcacccataaactgccgagcaaatgagttaatcgatcagaggtattagaagtaacccttgcatcactgaccagtgaaaattcaagatcatcctcaaatagcggatgattttgaatttctaattttaaaaagtataatttatttttattcataattattcacctaaaattgttttattcaggctaaattttatcatatttttgcattttatacataaaatctgtttaaaatataaataatcctcatcaagtagttactacttcatgaggattatctaaaatattctactttctaatcatcttaactgcttgaatcaaaatcgttggaatcagagccaagccagcaagccacattacttcttgcccagttaacggagtaactgcaaacaagctatgtaacgccggtacaaacaaaatcaaggctaacaaaattgttccgacagcaaatgctgctaaactgtaccagttatttttgaaaccgatcttgaagatactgtgttgtgaacgacaattgaagccatgtaaaagccgagcaaatgtcaatgttgagaacgccatcgtcgttgcaactgcaggactatcttttagtccgatcaaaaaggcagcaattacactaatcgaaatcaacaaaccttgaatagtaatttgactcacaaaggctttgtccaaaataccagccttaggatcacgtggcttacgtttcaaaatatctggatcacctggctccattccaattgctaaagctggaagcgaatcagttaccaagttaataaagagcaattgaaccgctacaaatggtactggtaagccagcgagtgaagcaaataaaacagtgataattgctgaaaggttacctgataacaagtagccaatagcgtttttaatattttcataaactgttctaccgttagcaacagctttgataattgtggcaaaattatcatcggccaaaatcatgctggcagcatctttagatacttcagtaccagtaatccccatcgcgacaccaacatcggccttcttcaaggctggtgcatcgttaacaccgtcaccgatcattgatacgatacgatcttttctctgccatgcattaacaattctgatcttgttttcaggcgatacacgagcataaaccgaaatcttctcaatgttttgatcaagttcttcatcgctcaaagcatctaattcaaggccagttaaagccatgtcaccttcattgaaaataccaattttcttagcaattgcaacggcagtcaccttatggtcaccagtaatcatcacagtcctaatcccggcttccttagcacgagcaactgcagctacactttcttcacgtggtggatccatttctgaaacaaggccaataaaagttaagccatcttctgcttcagtagaaagctcttcatcactttctttataagcaaaagccaaaacacgcaaaccattttctgaaaagtaattgttttgtgccaaaatttctttacgatcttcttcagtcattggacgaatttcatcgccgaaacgaatattgacacagcgtttcaagagcacatcaattgcacctttaacaaaaatagttggtacagtatgaatcaaatgcttagtactcatcagcttacgatctgagtcaaatggtacttcttccagacgcttagaatgttcgcgtaattcttgttctgataagcctaaaacaccattacctaagtcaattccgggcacttgacgatacatttccagcaaggctgactcagtcggatcaccaattgccttatcttcggccaaacttgcatcgttgttaagcactacatcataaagcaagtagcggtgaagttgattactcaaatccagctcatttggctttaaaactttaccaccaatatagatgtcctcaacagtcatcttattttgagttaacgtaccagtcttatctgaacaaattactgatacagaccctaaagattctacggctgccaagtttttaataatagcattttctttagccattttttgcgtacccattgcttgcacaatagttacgatagaactcaaagcttcaggaattgcagcaacagctaaagctactgcaaatagcagtgaatcaagcagcggttgaccacgccacatttgaataccaaagatcacagcacacaagattaaaatagcagtagccaatcgtgatgaaaactggtcaagtgatacttgcagcggagtgcgacgttccttagtttcattcatcaaggaagcaatcttaccaatttcagtctgcatccccgttgccgttaccacaaccgtagcacgcccataagttactaaggaactggagtaaaccatgttaacccgatcagctagcggcacttctttttcaaaatcagtgtccaacttgtcaacattagtcgattcaccagttaatgaactttcgttgacttgcagagaataattttctaaaattcgaccatctgcagtaactaagtcacctgcttctaacaaaagaatgtcgccaggtaccaagtccttggcctcaatctccattttttggccattacgcaaaactttagccgttggcgcagataatgactttagcgattctagcgacttttccgccttaacatgttgtaccgtacccaaaatcgcattcagaatcaatacaacaataattaccaacgtactttccagactgcccgtaaaagcagaaattattgccgcgataattaggatgatcaccattaagtctttaaattgttctaaaaagacctgaaaagtaattttcttctttccttcaactaaagcatttggaccaacttgagctaatttctcttgagcctctttagcgctcagcccctgctttaaatcggtatttaactctttagctatctcgtcttttttctgacgatagtattccatgtaaagccctccctaaacataagagtaatttaagcaaaaaaatagagactactggctaaaacactgtttagtcaatagtctcatcatttaaacttacagcggaaaataaatttcgttctgacgccgtaaatacaatttatgccgattactccctatttacttgtacataattaaaccatatcaagtaggtagttggcaagctattttaactttcttttaggaagttttctaattgttcatcggtaaaatcagaaccgtaattttgttcaaggagatgcatgatctcttgcttggtattaccagttcttttaagtgaagaaactaaaattttgacgcctcgtttaagtccctcttctttaccttcctcacgtgcgtcttgttctcgctccagtattttctcttcgtagtccatgatataatcactccattccgagcaataagataatcatttgtacttcttatctttcaataatccgttagcaatatcagccgaactaactggtacaccgactaaacgctcatttttccacaaatcaaaaaaatcagctggcatcatttgatcaaattcatcatctgaattcattaaatccttataaacacgtgacttctcaaataaatttagagcctgcttaggataaatgtttaatctcttagcaattaagtcgctaattgcttcagctagttgctgatgaaattgcttttcactaatttcgggaatcatctaaccaactccttatctatgaacgttaaagctttgagagctctttctgtcttgaaacaatactgctccgaataaacactcggttttaattttagcagagcctcatctaaatctagattaccatgtttccagcaattaacaacagaaaaaagtttaccatctgctgttgggccaatgacgatatcagaattatcttttatattattcattctattttgaatgacaaacttaatccaatcaatatctgcttggtaaactaatattttcaagtcgggttgatcagcatcgaatacatatctatttaatgtcggttgacctgaatatctagccttacgctttgcccatttttctgcttgtctacgattagcagtcacataaaagccattaccaaaatcagttgtaaaaacatttttatttatacgaggctgataaacagcctgattgcttccatgatacaaaatgactttggtattgcttttcatgaatcgtgatgtatgcgtatttttcatcgcgcacctctttcataaatagtaggacaaaattatcctccactatttattacgcaaaaaagcacgatttttttgtgagaaattaaaataaaaaaagaaaatgcctgagaattatatcccagacattcaccaatttacggctctttctcatttctcttccttcacaatataaattggtcgttctttaacttgtaaatagattttaccaatataacggccaataattccgatacacaaaagctgcaaaccgccaatcaataaaataattgaaattgtgctggcccagcccaaaatacttgaaccaggaactattagtttacgaacaattacaaaaataagaccaataattgacaaaatgaatgaagttatcccaatccaaacagctaagttaagcggtgcttgagaaaaatcagcaatcccgcccaacgcatatttgaataatttgtgagtcgtccaatcagtttcaccagctacgcgctcgacattgtggtactcaagatacttagtcttaaaaccaacccaagcaaaaatacctttagaaaagcggctgtattctttcattgataaaactgcgttaaccatctgcctggtcatcatgcgatagtcgcgtacgcctgaaacaatttccactttagaaatgcgattaatcaccttataaaattgattgctcaagaaagacttaaacttaccttcccctttacgatctactcgtctgcagccaactgcatcatagtcaccagtctgcaaaattttatacatttttggtaaaagtgaaggcggatcttgcaaatctacatccattaagacaatataatctcccgttgcagctgataggcccgcatagatagcggattccttaccaaagttacgagaaaaagaaatatagtgaacatgtttgtcctgctcatgcaattttttcaattcggtcagtgtgttatcattggagccatcatctacaaaccaatattcgggcgtcactttgggcattttagctaatactttttgcactgctggataaaaaagtggaattgtttcttgttcattaaaacaaggaaccacaattgataatttttccattagatttcttctttcttagcttttctaaaagtaactactttattaattacaaattgaattaaagttgctacaaaagttgctactattttaacgattaagtgcggataacccaatttagtaacgaaaataaatagggaaaccgtagtaaataccgtggtaatctgaccaacgataaaataagaaataaatcttaatatcatgcgatcatgaactttaaagttagtataagaattccataaaaagttattgatgatcccgcaggtagacgaaataatgttagctatttcaacattcatcttgaaatgcgtcaaaattgtataaattccaaaatcaacgactagccctaatacgccaattagaacatactttactaattgaacaaaatcttctgaatagattgctgttttgattttttccataattattcctaataaaaaatccagacaagaggtcctggatttcaacatatttaactaatatggtcttaattatatcattgtttttaagctctacgttttcattattaaagttaaaactttaataggaacaccttttgcattaattataatttttgtcattcaatctatctgtcttgttagtatcctcatacaaatgataggaactcttaatcttatgcctgccttgtggatcaaacatgcagagaaagataacatagcaacactttaaattttgatatgtgctgcatttcaaaatcatacagatttccatcaacatcctcaaccaaaatatcgagaataacagctttttgcttagggtgtttgggatcagcgacctttctctgcttctgcagataatgaatatctctaatctcaatctccggcaccagtccctgtaggacatgcttgcaaaaattcttgttagacataatctcaccaaagattacatcctctgtgaagccaaaccagggcttctttttcttgtgcgtattttccattgcgcacctctttcataaatagtaggacagaattatcttccactatttattacgcaaaaaagtgcaatttttttgtgagaaattgaagttttttaaagttttacccaactatatcttccaacttcaattccagatattctccccgctttaagttagcaggcaagcttaactttcccatcgaaattcgctctagctcaacgactttcatccctaccgcaccaaacatacgcttgatctggtgatatttaccttcacaaattttaatttcagttgtagacctatcgtgctcttcatcctgggataatatcttcaattctgctggctgcagtttggtcccatcgcctagtgtcattcctgaagcaaaagttttaacagttgcatcattagctacaccagcaatttcagcacgataaactttatcaacatgcttaccaggtgcaagcaattcatgattcaactgaccatcattcgtcaaaaggagcaagccagtagtatccttgtccaaacggccaactggcacgattccttgataacggtcctgcggtgcaagcaaggaaatcaccgttggctgattgcgatcttccgtcgctgacaaaacacctttaggtttattcaataagaaataatgatatttttgataagcaacagcatctccgttaacggtaacctgatcgctttctttaacttgctgctttggcgttttaacaatcacatcattaaccgcaacaattccttttttaattaattggtgtacttcttttcgtgagccaacattcatattggccaaatatttatctatgcgcattatgtctttctttcgttcttatgtgttgattaatattaattatataagaaagttaacccaatttcgaattgcgacactaatcaaaaacggtcgattttgttttcgaccgtttttacgcgcgttttgcgcgcgattatttgcttaaaatatattttgtagctctgccttcacccattcttctaatataaccttgtttttctagttgccgcaaaatcttcaaaactttcgtcctaccaaacttactcatttggctaatttgcttcgtagtatccgcaccttcatgaattatttgatatactttcttttcatcattagacagatcgtccgtaataaattttaaaactggcaatattatctttatcgaattatcaaaaatttcaaactgcggttgaaccaaactacttctataagaatcatttattcttcttacacctgtaccaaattgctcaattaatcctaacctaaagaaaacattagcaataattggattacgcaaaatggaaatctgacctgaaagatattcttctttgctaagtccttgtggcaatccacctggagatactacttcaattctgtcatcatacatagaaattttaatttgcgaattaatgttccaaactcgatgaactaaggcattggctattgcctcacgaaaagcttcttctggaatctgacttacaatatttcgcgttgctccctgtatttcttcatgttgataatattgacgatatttttgaattgcttgcttatactctttaagaatagattcatgctcataacttgctcgatcaagcataatattaatgctttcaccaaaccgaacaatatcaattccacgataattatttttgtctgccaaaagctcaccggcattagtgtaactagtatccttacgctctaaattaagcgtaatcaatatatcagatgttaaacttttaattcctatcttttcttttaatgcttcttctaaaatgttaaatgacaaattttggttcatcgcggttaaactatcataggttctattttcaccaattaagattaactgtgataattcagatcggtccacttcgatcgaagcactgtcattactcttataggcctttgatttgtataaatatggaggattaactccttgctttactgttaaagtaaccacattagttttaggatcaatttctaaattataatctggatttggtttgatcgaatcgttgattttattttcaacatttaaacaaaattcaactggatttttcacaccaacgattgatccatcatcctttattccaaatttaattttgccactgccataatttgcaaatgcactaaccgtttttagaaaagtattcgtcaatttctctttaaattctaaatttttggtttctctcatttaggtcaccgtttctaaactatttagttataattatactctttcacgcgcaaaaaaacggtcgaaaacgaaatcgaccgtttttacgtgcgttttgcgcgtgcctattatattaactttaaatcaatacataatactactagaagtttccatattaacaccatatctttctaaataattaaactgtatcatattaaatttcaaaaacaccagtgaaattaatcctctataacaagtcagcgtcttcttgagctttatcatccaagaatttttcatttggataaattggcgtaatctcaataccagccattgccctttcaatcaggccttcaacgtcaagacgagcttcatattcacgcgctttttccaactttggcttagtcttaggacgcggtggagcaaaaattgtacaacaatcttcaaaaggttgaattgataaatcaaaggtaccaatctcttcagctttggcaataatctccgttttatccattgttgcaactgggcgaataaccggagtagtagttacatcattgatagccaccattgattgcaaagtttgagaagcaacttgaccaactgactcaccattaaagatagcccagccgccacgttgtgcacgaatgcggtcagcaagctgcaacataaaacgacgttgcacagtcatcaaatagccttctggcagtttttccttgatcgtttcttgaatttcagcaaacggtacggcaataaaattaatcttaccagcgtagtttgccaaaataccagtcaattccttagccttagccaatgccttttcagtagtgtaaggtggactaaagaagtgaaccatttcaatatctactccgcgcttcaatgccagccatgaagcaactggggaatcaatcccaccactaagcatcatcacagccttaccagcagtaccaacgggcatcccgccaacaccatggagcaactgattagaaatataaacggcatcttgacgaacttcgattctcaagaccaaatcaggatgcttcatttcagccttcaagccatccatatgatcaaacaagtagtcaccaactagattattcaattgattagtgtcgtattcaaacttgtggtcactacgcttggtattaaccttaaaagtcattcctggcttaaaagtctcttgcatcaattccaaagaagtcttttcaatatcttcaagagtcttaggaatcttaattgctggtgagtaagtttgaattccaaataccttcttcagacgttggtcaacatccttgaatgatgcgccattcaggacaatgtgcatccgatcatgacgaggatgaaattcaatttgtgggaaatccttaagaactttttcaacgttacttgctaagcgattgatgaagtcctttctgttcttccccttagttgaaagctcgccatagcgaaccataacttctgtgtattccattaattttctcccaaatgattaattttagcaaaatgattatagatcttgtcaaagaccttaataaattcatccgcttcttgaagcgtattcgtctcatcaaaacttaaacgaattgcactagtagcaatcttatcatcaattcgcatagaaaccaaggtgctagcctcatctgccgtctttgatgcacaagcagaagtagttgaagtataaatatcttgatcttctagcgtatgaaccaaagtttcgccccgaattccctctaaagcaaagcaaagaatatgtggtgcaaagccatcgcttactggtgaaaaaatattaatccctggtttatcttttagataatcaacaattttagccttaatttctgcttcacgcttggccttttctggttcatcttctaaaagcaaacgaattgccatagccattcccgcaattgcaggcaagttctcagtacctgaacgcaagcccttttcttgaccaccaccatcgtgtaatggggtcagcatcttgccttcttttttatataaaatacctataccacgtggtgcatggaacttatgcgcagataagctcgagaggtctactcttggtgtaaaaaccttatcccaaatatttttgccaagtgcctgaacgttatcaacatggaactgaatcgttggataattttcaagcaaatcgctaatctcatcaattggttgaatggtgccaatttcgttattaacgcccatgattgaaaccaaagttgtatcagaatcaatcgcgtttcttaagtcattaacgttaactcggccttccttatcaactggcaatctggtaacgcgccaacccaaattctctaacgcgttaaaactattggctacagatgcatgttccacgctagaagtgataatatgcttaccaaattcacgcttttgaattgcagtccccttaattgcggcattatttgattctgttccaccagaagtgaagaaaatttcatgctgcttagtccccagcaaatcagcaatttgtttacgtgacgcctcaagcaattggtgtgcacgatcacccatcttatgcaaactcgaaggattgccccaaatattagtcgctactttattgtaagtatccaatacttgtggatctatcttcgttgttgcactattatcaaaataaatcactatcattaccccttcatttaaaaaacggtcaatcgcttgaccgtttcaagacttttcaattttagcttaaataatgaatcgcttcaattaattactcttctcttctgaataatatgcattttcaagtcgttgataactacctggctctaccttttcaattgctgtagcaattgtatcaagggcttccttatagttatattcattatatagctgcattgctgtcttttgtgcttgcgcaattgaatccttatctgcatatttatttgaatactgcatcgtcaattcaactaggttagcggaattaatgatgtcatctgcttcacgtttaagccgctccacatcatcagaaatttgaattaattcagctgagatcttttccatattaatccggacctgacttaattcgttgctgacatgaccaatctcgttgactaccaaagtgtacatttggacaaagctatcaggattgccaggcaaatttcgtctttcaagtcgacgataaactaatgaaacttcttgcttaaagcgcttgattgaatcattagctacattttcagaatcataaagtccatcaacgtcagttgacatcttagcctgctctgcatcaatttcacgcaggcgatctagcatctggagccatgaatcttgaatagcagagtaaacacccttaccatctgcgatattctgtgtatcaatagtgtactgatggtacatttcattgacttctttttctaagtctttactcttttccaattcgccatgagtcaattcatagctctcatcaatatgccgcaacttttctaccagtttctttgacgcggtttgctgatgtgagatcaaagtcagcattttactttgatttttttcaacaaatggtcttgccttgtattccttagctaaaacatcatacaggtcgtcaatttcgccagagatctttttattttccttggctaattcatccaccttagtctcagctagcaatttgcgcgcaccatcaatttcatcatgaatttccttgattctgcccaaaacatctacgctagtaaggtaatatttttctgaaatcatttttttataagcatcagacaattccttaagctgatcttggaacactacttcaagctgatgataaccctcttttagcggttttaagcgtttttgtaagttacccaaagacatccgaatcttggacaaaactcgcttagcttcaacatgatcaccttgtgaagaaagattttttgcttcttcaaagtcactctccattgatgctagttgatcttcaacctgatcaatcgcagcaccatattcaaaggaattggctaagatatcttttcttaattcacgataaactttaatcaaagcatcatattgaatttgattttccttatttgattcaagtagttccgtgaaaactgccttggtgttacgagcatcttcgagcgttggcttgataatctcctgtgcttgtttaatattctttcttgctttaaacaagcgataagttgcattttcattagcagcttcttcaactagcttatgcactcgcggtaattttttcttagctgcttcagtgtagctcttgcgccaagtatttaatgtagttaaactttcgccggccaaatccattttatccagtcgcgtaatatcatcttctagatgcatcttctcaatttcagtcactgctgcatcaatcgcttcaatttcttttagttgtttacgattgatcattagcattgctgcaactacgacaatgattaggatcaccacggcaataattataatagcttgaattgatgacatagtttatcctccaaaactatcataattataacaaaacctgaccctaataggtgcaaaaagctgttctattttcttgatttattattctgaactctatataatactattcgtgtaaaatatttgcagcaataagtgacaagaacgtcaacatcttgaaacgctttagtgaacgagtaacccgcgctgcattgggcgaaaatgtaaatccaagatgcacgaatgttgaacttatgcttaatattttactccaaaaattattgtttaaattttatggaggattttttatgtcaagatatacaggtccaagttggaaacgttcaagaagattgggtatttccctttcaggtactggtaaggaaatttctcgtcgtaactacgctccaggtcaacacggtcctaacaaccgcggtcgtttgtcagaatacggtcaacaattgcacgaaaagcaaaagttacgttggatgtacggcttaaacgaacgtcaatttagaactttgttcacccgcgctggtaagattcgtgaaggtcaacacggcgttaacttcatgattttacttgaacgtcgtttggacagtcttgtttaccgtcttggtttagctactactagagaacaagctagacaattggtaaaccacggtcacattactgttgatggcaagcgtgttgacattccttcatacgaagtcaaggttggtcaaactattggcttgaaggaaaagtcaaagaacttacaacaagttaaggatgccttagaagcagttactgctcgtccatcatttgtttcatttgatgaaaacaaaatggaaggtactcttgtacgtttaccagaacgtgacgaaatggaaccagaaattgatgaagccttagttgttgaatggtacaacaagttactttaatttttacattttattttgtcgaaagtctttctcaatcgagaaaggcttttttctttgctacaataagtacataaaaagaaaggatgattagatgactgaagatttaaataaacgtgttgaacaagcagctcaaggtattactccacaaactaagcctgatgaacgccgcagatttttaggttcattacgtgagcgctgcttaatccgtatggacaatactgaagttaaaaatcctgaattaactgccctatttcttaaacatatcactgactttaagggctatactattttgatcaatggcaatatcactgatgatggcttcttgggagacattgaagccagttgcagcaaatatgatattcccttcactttagttaacaatgaaaccgcaaaaacaggaccacatgatacggcagtactagttgtagcgaaaaacgctatcaatcgaccacgaattgagctaaagcaagtttatccacctgagtttcctaaagaagaattagccgcacctaaaacaaaagaaagtttttggcataaactttttcacggagataagtaaatgaaaccattagcatatcgtatgcgaccaactaatttagacgaagttgttggtcaaaggcatctgattggtccaggcaaaattattcgccgaatggtggaagctagacttctgtcttcaatgatcctttacggccctcctggcatcggtaagacaagtattgctagtgctattgcaggctcaactaaatatgcctttagaaagctcaatgcagctactgacggcaaaaagcaattgcaacaagtagccgaagaaggcaaaatgagtgggacagttgtcttattgctggacgaaattcatcgtttggacaaaactaagcaggacttcttactgcctttgctagaatcgggacaaatcattttaattggggcaactactgagaacccttatatttcgatctcccctgctattcgttcacgttgccaaatttttgaattaaagcctctttctacagatgatgcttctcatgcaatcgatcgcgcattgaacgataaagaaaaaggtctaggcaaatataatgttgaattaacagatgatgcgcgtgctcttttgattgaaaaaggcaacggtgatttgcggtctactttgaatagtttagaattagctgttctttcaactaagcaagaattgcaagataaacaccaagatgatcaaaaaattatcatcactcaaaaagaaatggctgattcaattcaaatgaaggtgcaaaactttgatgcttctggtgatggacattacgatctagtctcagcatttcaaaaatcaattcgtggctctgatacagatgcagcgctgcactatcttgcccgattaattgaatctggtgacttagtctctatctgtcgaagactagcagtaattgcctacgaagatattggactagccgatccagacgcagctgaacacgctatagtagccatccaagctgcacaaatggttggcttgcctgaagcacgaattccactggctaatgcggttattgagttagctctttctgccaaaagcaatagtgccatttcagcaattgatgctgcactagctgatattcgaaccaaaaaagttgactcaattcccgccaacctaaaagatgctcattactctggtgccaaaaagcttggacatggcgtgaactacctttatcctcatgattatcaaaatgattgggtagcacaacaatacttgcctaataacctgcttcatgccagctactttgcacctaaaggcaattctaaaatcgaagctagatataaggcaacctatcaaaaattaaaacaaatgcagtctgataacttgcgcaataatcactaatctcgcgcattcaatatggttgacaagcacctgtaatatgcgtattataataagtgatctgagttgatcgacaagcttaaatgtataaagttgaccgatcaaactataagacgtgggagttggcaaataactaccgaatcggaatactgccttgttgcaggatccatattcgctgcgatgccagctaaaattttgaacattgcgggttcaacaagcgtcattatgctatgtttagtcaactcggatttctttagaatattaaaaaaggcggtctcaattgaccgtctttttctatagtggagactgttaaatggcaataaagattgtaatgattatttttatccttctcctactgttaacctcgtggtacatgtggcacagaaggaacggacattttttaatttatgacattggtggcgatccacgcttgagcaatattcttaagtggacttcagtcgcccttttagctgaaagtattttagggattattttgctattcatgggtaataaatatttaaatctaatcaccttattcttagcttcattaactattttggcttttggtttatcaattactcaaaataaagaataataattcactaatgacaagcaaaattttggtaaaatagaatatagaaagaggtgcttatatatgctttcacaatacaagaatattcaagttgcagttgatggttcaaaagaagctgacttggccttcagcaaggctgtagccatcgccaagcgtaaccatgcaacactagaaatcttacacgtaattgatactcgttctttccaaaatgtttcaagttttgattcagcaatggtagaacaagtttctaaagatgctgaaaagagaatgaaggattaccaagctcgtgccactaaggctggcgctgaagatgttcactactctattgaatttggttcacctaagacaatcattggacatgacttccctaagaagcacaatattgatttaatcgttgtgggtgctactggtttgaacgctgttgaacgtctgctcatcggtagtgttaccgaatacgtaaccagaacttctaaatgtgacgtcttggtatgtcgtactgaagaagttaaggatgctttgcaaggctaattatttagctttaataaccgataaaaaaatacctccaaaattcagatttgaatttttggaggatttttttaatgttatttctaaaaatcgccagccgtactgaacatgtaatcacgattatggaacttcatcgacaagattaatccaatcccaatcatgtttcccatcagagctgaaccaccctgagaaacaaatggcaatggaatacctgtcaatggcaataaatcaatattcatcccaatattttcaaatacgtggaacaagatcatcatgataacaccagttgcaatgtatgaataaaagacatttctggtatcgaacgagatttttaccatttgaataatcaggtataaataaatcaaaatcaatgctacacagccgacaaaaccaaagttttcaccaattaccgagaaaaccatgtctgatccacgaactggaacataaacgctagctttgccaaaaccattaccaaatagttgaccagaaccaatggctttcatactttgccataactgataagctcctgatgaagtatcaccagatggatcgagccaagacttaattcgttcaaattgatatgcttgaaagaaatgactcaacaatgattgcccagccgacgtagttactaatacaataaccccaatagctgctaaaatcaaaataccatataacggtacaataattttccaagaaatccctgatactaaaaccacgccaccaacgatggcaataaatactaacatagtaccaaagtcattctgtaactttagtaaaattgctaccggtgccagccaagcaataattttgcctaataacaaccaatcggtcttaatcgtgtgaccatatttatcattatgctctttgaccactcgagccaacatcaagataaaagctggcttcataatttctgaaggctgaaaagtaatcggccctagtttgaaccaacttttcgcacctgtatctgcagctacgcttctgttatataagaatagcaccgcaatcagcaaaaatattccgattccaaagaaaattggcgcaatcttaaacaactgttctgcatcaaactgcatcacaaccataataattgcaattgaaatcaagtaccataatgcctgcataactactgccctaacaggtgaaccaatatgactaggatcacctaatgcagcaacatagatacaatacaagctaattaaagccaagagtagcactggtataataatattccaggctaatcgatcgaatagacttgtttcattttcaacttttgccattaaataatcactacttatattttatttttcatgtaaggtaaagtatgaaagtaagtcattaatgctgctttcaagactgttagcaaacaaaatattgcttgtcttagaagtagtagcacgataacgcccctctaccttttcaattaaaccaatggactttctattaggaataacaacttcccacgttggcaaattctttcccttaagttcattaacttcaatatcaatattctctaattttttagacataaatcctcctacttgctatccggatgaaattttgaagcaataattggatcttcatatctctccggatgtggatttcgaaaaatagtaaaattatcaggaactggatccactccacccttgataaatgggttacaccttagtatacgacaaattcccataatcagccccaaaataggaccatgttttttcaatgcatcaatcatgtaattggagcatgttggataataccgacaacttggtggtagtaaaggtgaaatcactgtctgataaatacgtacaataaaaatcaaaatcttacgcaagtaatctcctcacttagtgtcgttgatgcttttcaatatttttaagcaaagtacctgttcctaaagcaactgcttctaatggatgatcagcaattaaaactggaacttgcaaataataagaaatcaacttatcaatattctttaatagggctccaccacctgttagcatgattccgcgatcaataatatctgctgaaagctctggtggagttgtttccaatacttctttagctgctgcaatgattgacatcaagcctggttctaaagccttttgaatctctggtgcagtaactgtagtctgcttaggcaaaccatcaactacgtcacgaccacgaacagtaatttgttcatcttggtctggttcaaaggcgctaccaatttcaatcttaatttgttcagcagttctagaaccgattaacaaattatgcttactcttaatgtaactgatgacagcctggttcatccgatcgccagcataacgtaatgattgagaagttacaatttcacccattgataaaactgcaacgtcagtggtacccccaccgatatcaatcaccatattaccttgcggtttaaaaatatccaagcctgcaccaacagccgcaactttaggttcaaagtctaaataaaccttgccgccaccagacttttcagctgcctgaataattgctttttgttcaattgaagtaactccagtaggagcacaaatcaaaatatttggcttggacataaagccttttacatttaatttttcaataaagtaagacagcattgcttcggtaatgtcaaaatcagcaattaccccattcttcaaggggcgaattactcgaatattacctggagttcttcctaccatctcatatgcctctgaaccaactgcaactaccttgtttgtatcggtatttacagctacaacagaaggttcatttaatacgatacctttaccagagacattgatcagtacgtttgctgtccccaaatcaattcctatatctcgtgccacgataaccctccataattattcaccgtccattttaccataaataatcatgactttcctttactgtccttgttttaacacaatctttaaaacaaattactcaattgcattgaagtatcgataaaagtaatgacaaaattgccaactaaaaagcctaagccaattgcaataaataaatataataattgcgtttcaaaaacatggcctttacgaataattttatctagttgaattgctttaactgcttgaaaagataagccaatcgcaatcaaatatataatgatactaataatgacatgaacgcctaattgaaacatatattttcctcaattttgacaaaaaaagacggatgcagcattttgtgcattcgtctcttccttcttctagtgacctttagtgttgtacacgctaattctgttcattgctcgtcttaaagcaacttcagcacgtgccatagtttgttcgtcatgtttttcccgtgcttccttcaaacgttgctcagcgcgttgcttcgctgcctcagcacgagaaacatcaatgtttcttgcgcgttcagcactatctgcaataatcgtagcaacattattcgaaaactcaatatagccacccgaaatcgcaatatgatcaactactgaatccatttcacggcttcgcttaatcttaacctcactaataactagtggagttaaaagtggtacgtggttatacatgattgaacgttcaccatcaacggcacgtacatcaacgatacttccacgatgtgaataaatcattccattaggagttacaacatctactttaaaaagcttctctggatctgccatttgacatcaccctacttttctagtaaagctttagcttctggatcacttggagttacacccatttcttgtgcttttttcaaaacatcttcaattgggccgacaccacgaaaggcatcttctggtaagtcatcaagatgaccatccaaaataagcttaaagcccttaatgctttccttaattggaacatatgaacctggtacaccagtaaattgttctgcaacaaagaagttttgtgacaagaagaattggaccttacgtgcacgtgcaacgatcaatttttcttcatcagacaattcatccatacctaaaacagaaataatatcctgtaattcatggtaacgttgtaaaacatgttgtactcgagtagctacttcatagtgttcttcaccaacaacttcagggtcaagggcacttgatgaagattcaagtgggtcaacagctggataaataccttgttctactaagctacgttccaagttagtagtagcatccaagtgtgcgaatgtggttgatggagctgggtcagtatagtcatcggcaggaacataaacggcttgaattgaagtaattgaacccttcttagtagaagtaattctttcctgcaattgtcccatttctgttgctaaagttggctgataaccaacggcacttggcatacgaccaagcaaagctgaaacttctgaaccagcctgagtaaaccggaagatattgtcgataaagagcaacacgtcttgaccctcaacatctctaaagtattcagcaagtgtcaaaccagttaacgcaacacgcattctggcaccaggcggctcgttcatctgaccaaataccatggccgttttacttaaaacgcctgaagctttcatttcgaagtaaaggtcgttaccttcacgagttctttcaccaacaccagtaaatacggaaataccaccatgttcttgagcaatgttgtgaattaattcctgaatgatagtagtcttaccaacaccggcaccaccgaacaaaccaactttaccaccacgtacatatggctcaagcaagtcgataaccttgataccagtttcaagaatttcacgactagtagtcaagtctgcgtacttaggtgcttccttgtggataccttcacgagggtgatcttttgaaaattctggaccaccgtcaattggttgacccaaaacgttaaacacgcgtcctaaagtatcttcaccaactggaacggaaattggaccgccagtatcttcgactttcataccacgacgaagaccatcggtagattccatggcgatcgttcttaagacaccatcaccaagctcaagtgtaacttcaaggacaatgctttcatcctctgacttaattacacgcaaggcattgttaatatcaggtaaattcttatcaattgggaatttaacatcgacaactgggccgattacttgaacgatttcaccttcactcaaaacatctacctccttttctttattactctaaggcatttgcaccactgataatttcagtaatttcagtagtaatttgtgcctgtctagcacgatttaattttgtagttaagtttgataccagatcattagcattatcagtcgcactctgcatggctgtcattgaactagcatgttcggcagtcttagcatccaaaatagcaccgtaaatagtagaacgtgcatattgtggtaacaacttcattaacacttgatttggatctggttcaatatcgtattctaattctttatgtgcttcagcttctttgacaccaatatctaaatcgacgattggtaacattttttcaacacgaaaagcagatgataatgagttaacgtggtgagtataacatacgtaaagctggtcatagacaccattcaaaaacatcttaattgcggttgaaacaattggtaaggcttcatcaaaagttggtacatccgaaacaccattcttttcataaacaacgttaatattgttctttttaaagaattgtgccgcaaccgaacctacagcaagaactttgatatcgtgtccttgagcacgttcgtcctcaaagatactcatcatattcttaatgacattgctgttataagaacctacaagaccacggtcacctgaaattaccaagaaacctgttgtcttgatattcttacgtggctgaatcatatctgccgtaatccccaaaccaaagacatcagtataatcaatttgagcaacattgttcttatcaattgagacgtctttttcacgtatattatcaactacttctgagctaattaaacgagaaatagttctacgaatatggtcgttataaacggtataacctttatcacgattttcagtttggttcaactttgaagcagagaccattctcatagcttctgtaatcttaccagtttgttttactgaagcaatttttttctttaactcaagtaaagatgcaggcatattctacctcctatttctcacttggtgtaaagctctcactgaattcttcaattgctgctgacaatttcttatcatctggcaattgaccagtttcacgaattgtcttgagcaaatcagcatgactgctgtcaaagttatcaaataattcgttttggaaacgagcaatatcttcaactggaacagcgtcaagatatccgtgagtcaaagcataaagaatcacaacttgcttttcaacaggaattggatcatgaagtggttgtttcaatacttcaacggttctttgacctctattcaacttagcttgagtagcttgatcaagatcactaccaaattgagcgaaactttcaagttcacggtaagctgcaaggtcagtacgcaaagtaccagcaaccttcttcattgccttgatctgggcgttaccaccaacacgagaaactgagttaccagcatcgatggctggacgagtaccagcaaagaacaaatcgctttgcaagaaaatctgtccatcagtaattgaaattacgttggttggaatatatgcagaaatatccccagcttcagtttgaataattggcaaagctgttaatgaaccgccgccaagtttgtcattcaacttagcactacgttcaagcaaacgtgagtgtaagtagaaaacatcacctggataagcttcacgaccaggcggacgacggagaagcaaggaaagttcacggtaagcgacggcttgtttggataggtcgtcaaatacgattaatacatccctgccattgtacataaattcctcacccatagcagtaccagcatatggtgcaatataaagcattggtgctggctcacttgggcccgcttcaacaacaatggtataatccattgcgccaaaacgctttaaagtttctacttgagttctaacggttgattccttttgaccaacagcaacgtaaatacaaattacgtcttgccccttttggttaaggatagtgtcgatggccaaactagttttaccagtcttacggtcaccgataatcaattcacgctgaccacgaccgattggaactaaggcatcgatagccttaataccagtttgaagtggttgatcaactgattgtcgatccataacccccggagccttggcttcaattggacgactcttgtcagtcttaatttcacccaaaccgtccactggttgacccaatgggttaactactctaccgattaaggcgtcaccaacaggaacttccatgattcgtccagttctttgaacacggtcaccttcacgaatattgtcaaattgacccaaaataatgatacctacatcatttgattcaaggttttgtgcaataccgtatgagccgttatcaaacttcaataactcaccggacaaaacatcgttaagtccgtgagcacgggcgataccatcaccaacataagttacaacaccaacttcgctgatgtcgagcttatcgtcgtaatgttcaagttgttgcttgatcaaggaactaatttcttccgctttaatgctcaatggtttcacctcttttaatttttatcaattatctgcgcacggatcttcttcagtttattcttaactgatccatcaatcacgcgatcttctacttgaagaaccacgccgcctaaaatacttggatcaactttattctctagacgcaccacgtttaggttatatttcttagcaaaactttcacctaaacgcttgagttgatcatcatctagcttaacagccgtagttgcaacgccagatgcgaccttcttttcattatcataaagtaagacaaagcgatcaataatatcgatcaaatcagcaaaacgatcatatttaaataacaaattcaaaaagttttgaacatcatctgaaaaatctttttcaattgcagtcaaaagatcctttttatctttactacttaaaataggatcgctcaagacactaatgatttgtggattggcttcagcagccttttttaattccaccatttcattataaacagtgtctaatgcatcattgtcttgcgcataaccaaatagtgcggcaccgtagcgtgctgcaatttcttctctacttaaagccattaatcatccaaccccttaataaattggtcgactaaatctttttggtctttagcagataaattcttagcaattactttttcagcgattgctacagaaatatcagcaacttgatcgcgtgcagaattcaaagcgtctgcttttgcctgagcggcatcttcattagcctttttgcgaattgctgcagcatcttcgtttgcatttgctacgatttctttacttgtgttttgcgcgttactcttagcgtcagagagaatttgtgttgcttcttgtcttgagttcttcaaggcagcttcacgctcattagcaagcgtttcagctttctttcgttcactagcagctgaatccaagtcatcaataactttttgccgccgcttttccatcatatctgatactggtccccaagcaaagtgcttaataagaagcatcaagatggcaaaacagatcaaataccagatagcattacctaagtaaatatgtgaggctgcaaataatgtttgaatagtcatttactgcccttctctctttaatactattcctttaaacagaaaattatctctttttattaaaggaacaaaatcaagaaggcaacaacgatagccaaaataggaacggcttcgatcaaaccaacaccaataaacattgttgctctcaagttacctgcactttcaggttgacgagccataccttcaagagtctttgaaataactttaccgttacccaatgatgcagccaaagctgctaaaccagctgcaatggatgcagcaagatatttaaaagcttctgacataaatttatacctccaaaaatttattctgtagtaaccttcttaccaatgtaaaccattgataaagttacaaaaacatatgcctggatagagccaatgaagacagagaaaccttgccaaatcatggctaatggagctgccaaaactaacgtaaatggtccaccagcatgtgctagatcattaccaattaaagttagcaaaacttcaccagcataaatattcccatatagacgtaatgataaggttaaaaagttggtaaactcttcaattaaattaattggaagcataaaaccaactggttgcgtatagctcttcaaatatccgccaacaccaaatcgttgtacgccgaatgtgaacgatagaagcaaggtcatcattgcaaacgacattgtcgctactggatcagcagttggtgatttaataaacatccaatcatcaactttgacttccatgaacatccctaattggttcataaaccaaataaacaggaataaaacaaatgcatataatgacaggtgattttgagcatccttgtcgctaacgttatctttaacaatgccgttagtgaaatcaagtaaatactcgaacacattttgtctcttattgggtttcatttcaacttttcttgaaagccaaatgcagataaataaaactgctaaaaccattagcgttgaaccgataataccagaaagttcaaaattcaagcccatgaatttaaaaacaaatgatttctccattacttcgtgacctcccttctcgtgctgaataaaactcgaacacgtaaatcatcttaacaccaaaaaaggtctttgtgtaaaatgaaagcgcattagagaaaatatttttctaaaaaggacgattacttagtaccaaatagtctgtcaccagcatcacccaaacctgggaaaatataaccattatccatcaatttgtcatcttcagcagctgcataaatgtcaacgtcaggatttgcttcttgaactgccttaataccttctggagcagctaccaaaacagcaagcttaatttccttaacaccacgcttcttcaatgcagcaatggcatcattagctgagccaccagttgcaagcattggatcaacgactaaacattcacgttcagcaatatcctttggagccttgaagaaatattcatgtggcttcaaagtcttttcgtcacggtacatcccgataacggcaatcttagctgaaggaaccatttcaaggacaccattaagcatccccataccggcacgtaaaattggcacaattgtcaacttcttaccagcaatttccttttggacagtcttacccattggtgtttcaatttcaacatcttcaagtggcaaatctctagtgatttcataggtcattaacccaccaatttcaccaacaatgcgacggaattcatttgaccccgtatccttgcgacgaataatagtcaacttgtgttgaatcaatgggtgatccaaaactacgaactttcccatatatgcctcctataaaaaataatatgatcattaaatattttaatcaaaaacgcaaagggtttaaagccctttgcgttttattttttatttattgaaatgatgtccacctgcagctttattcaatcgattcatgtaagctaaactttcttcaccttcatgaaatccttgtacataaatagtttcgatatcatcttgatcatcgaaatagcgcaagccaccaaataagttatggtcggcatcaactaaattgttgcccagatcaaatttatttgcttgaggtaaattaattttagctaagactggcgctaaagctgctacaccagttttttcattaaaatcaatttttgcaaaatcagcaggatcatcaaccacgactaccggctcacttggagcataatgacggtatttcattcctggtgccttaggtatatctttgtctgacactttgcccgtgttaattaaaactttttcacctaaaacttcgcttaactcttctggagtaatttcaccaggacgaagaacgattggtgtttctaccgataagtcgataattgtcgattctaatcccacacgagtagggccatcatcaataattccggcaatcttcccttttaaatcatggtaaacgtgctctgcagtagtaggactaggcttagttgaggtattagccgatggtcctacaattggataacccaatttagcaattaaatcatgagtcaattgatcatcaggacaacgaaatgctacagtatcaagtcccccagtaactgcatctggcagagttcctggtttaacaaacaatagcaatgtcaaaggacctggccagaaatgtttaattaatttcttagctctttctggaacttctttagcatacttagccatcatttcttcgtcagaaacagtaacgatcaatgggttatcacttggacgtcccttagcagcataaacgcccttcacagacttttctttggttgcaattgcacctagaccatagactgtctcagttggaaaagcaaccaattcacccttagctaacaacttaactgcatcattgatttgatcttttttaaaaatcttcgtttccatcattcttatttttgccaccttccatgaaccatgcgtggcttgccggccatatcttttctaaattcgatttcaaaatcaggcaattctttagcaaacaattccttcagttgttcttcttcgctaaaaccaaattctaagaaaaattctccatggctattcaaatgctcacgcacttgcttagcaaatttcttatagaagtctagaccatctttgccagcaaaaagagcttctttaggttcattttgcaagacattttcatccattacattcttttcgcttgtcttaatatacggcggattagagatgatcttatcaaattcttctaagcccaacagcacgttggctttacgagtagttacatcaagatcataagttaaaaagttttcctcacttgttcttaaggcagtatccgttacatcactagcatataaagttaaatctgtaatgccttttttctgtgcttctttagctaaagccacggtaatacagccagaaccggtacccaagtcaaggacttgatcacctgatttaagtgtctgcaatgcccattcaaccaattcttcagtttcaaaacgaggaatcaagacaccgcgttgcaccataattttatagcccaaaaaccaagcataacccaaaatatactgtggagatatgcccttagccaatttttcgatatctttattggcctgcttaatctggtcagcagttaagtccatttcttgcttcagttcaaattcacttggtgtcaagcctaagcgctctgctagaacataatcaacatcctcaggacgcgcattttcagcactctcacccgctttaatacgcatctgctttaaagtcattttaggcattttgatcagccaactcctctaattgcttagtttggttgtaaagaattaatgcatcaataatttcatcaagttcaccgttcatcacacgatcaagcttgttaatggttaagccgatgcggtgatctgttacacgattttgtggatagttatatgttctaattctttcggaacgatcaccagtaccaactgcattctttctcttagcatcgtactgagcttgattttgactttcataatagtcataaacacgtgatttcaaaatttgcattgccttttcacggttctgttgttgactacgttgatcctgcattgcaactacaatcccggttggcaagtgagtcattctaacggcactagaggtcttgttaatgtgctgaccaccggcaccacttgaacggtaaacatcaacacgaatatccttaggatcaatatcaatgtctacttgctcatattcaggcataacagcaacagtggcagttgaagtatgaacacgtccttgagattcagttactggaatccgttgaacacggtgtgcaccattttcatactttaatttcgaataaaccttgtcaccagtaatcatgattgccacacgtttatagccgccaacctcagtaggttctgaatcaatcattgaaaccttccagttttgacgttcagcatatttttcatacattctaagcaaatcgccagcaaacaaagaagcttcgtcaccaccggcagcaccacggatttccatgataatatctttatcatcgttaggatccttaggcaacatcaaaatcttgatttgatcttcaagctcgggaatttctttctcaatttcagaattttcttccttagccatttcaattaaatcaggatcagtttcactggagataatttctttattatcttcaatctcttttttgtcctctttgtacttcttatatttttgtactacttcacgcaaatcggcttcttccttagaaatctccatgtagcgcttagtatcattaataacttcaggatcggccatcatttcctgaagttcttcatagtgagctactagaccctctaattgagccataactttatccataaactaaaaatcctctctatctttcaacacctgggtgaaagtaatgatagcgacaaacaggataataactttcatcgccaccaatttgtacttgttcaccctcataaacaggcttgccattgttaattcttaaattcattgttgccttgtgtccacaataatgacaaatggtcttcatctcttctattttatcagcaaaaatcaataaattttcactaccttcaaatagatgattttgaaaatcgttttttaagccaaaggtcattactggaatattgaacacatctacaattttagcgcattctaagacatgatgtctcttcaaaaattgtgcctcatcaattaacacacaagctagtttaccatcaccatcagcaacatctgctttgttcatctttttaatataatcaaatagattcatatcagcagtaattggaattgcttctcggtgaagtccaattctagaagcaaccgttcctacaccgctacgattatccaagccactggtcattagggcaatcttgcgcccctgtgcttcataattgtgagctactttcaagatctcaattgttttgccactgctcattgcaccataacgaaaaaataattgcgccatgctggccctcccttttaacaaaaagtcttcgccttaatagtatagaggaaaaaataaatttgtgtaggtattaaacctcgttttcatcctcgctctatgctaaacttagacatagttttaaagtgagggatgtacatgagttttaaatcaggaattgctaaagttgccggtaaatcaagctattggtttttgcataatgcccttaagggcggcaccagttttccaggcaaattagcaatgaaaattgatccagaagttttaaattctttagccaaaggctatgaaactgttattgtcacgggaactaatggtaagacaatgactactgctttgattgttgaagctttaaagaaaaagtatggtgatgtgttaactaatccatctggttccaacatgcaacaaggaatcgtgaccgcttttttggctcacaagcacaagagagttaaaagaaaaatcgctgttctagaagttgatgaagcaaatgttaaaatggtaaccaaattacttcatcctagcgtctttgtattaaccaacattttccgtgatcagatggaccgttatggtgaaatctataccacttatgacaagatcgttaatggtattaaattagcacctgacgctacaattatcgctaacggagatgcaagcattttttcatcagttgaattgcctaataagaaaattttttatggctttaaacttcctgatgacaaacctgaaaatgacttcaaggctccagtcaataccgatggtgttctttgtccaaaatgcgaccacattttacattatcatgaacgtatttatgccaacttaggcgacttcttctgtcctaactgtggctaccaccgtcctgatttaacttttacagttaacaagattattgatcaaacacctaatagctcaacgttccaaatgggcaacaagcaatattccattaatattggtggtacttataacatttataatgccttagccgcctattctgttgcacgccactttggattaactgaagctgaagttgctcaagcttttgcagaaaataaacggatctttggtcgtcaagaattaattcactatggcgataaggatatcgatttaattctagttaaaaacccagttggtttggatgaagtcttgcacatgcttaatacagaaaaagatgattattcactagttgccttgcttaatgccaaccacgctgatggaattgatacttcttggatttgggatgctgattttgaaggattagacaaagaaaagattaaaaagatcctcgtcggtggtcaacgctggcatgatatgggctttagacttgaaattgctggctttgatccaggacaaatgagtactaatccagatgatgatagcctaattgaagaaattaaaaaactgccaactaagaaggtctatattctttcaacttatactgcaatgcttgcacttagaaagaagatggccgaaaagaaaatcattaaggctggtatgtaaatagaaaggattcccgcgggaatccttttttgtgtacaaaaaagctgtagctctaatgctacagcctttctaattattgggatattggggctcgaacccaaacatccaggaaccagaatcctgtgccttaccaatttggctatatcccagtaaatcacccgtacgagaattgaactcataactccaccttgagagggtagcgtcttaaccatttgaccaacgggcgaatcaacatttataattatgcttttttcttctatgcttgtcaagtaattttgactataataatgctaatggatggtgaaacatgatcgactttaataaaacacagcatttaattgaatcaatggtttttgaacgcgttgttccaggcgtcaattacacttttatcaaaaataagcaaatttttacatcaactactggttttgctagtatctacccagaagttactcagctgagcccttttgcagaatacgacctagctagtttgactaaggttttagcaacagaaaatgtcttgcttaagctttatgaccaaggcaaacttaactttactgagcccttgcagcaatttattcctgaatttaaagaccctcgtgtacgcctttatcacttgctaacccatactagtggcattcgtggctggatcccccaccgcgacaaactagatcatgatgccttactacaagcaattatcaatctgccagtaactgacgaatttgaacacaagatgcggtatgccgatacaaactttatcttacttggattagttattaaaaagatttttggcaaacctgtccaagaagtagtcacagagcaagtcctcaatcaaatgccgcttgaaaatactactttttcaccacaaaaggatgattgcgtgcctactgccctagttgatggccatgtcttgcaaggtattccacatgatcctaaagctagacaacttggaatagattgcggttctgctggcttattttccaatcttcaagacttagttaccttcgcccaaggttatttaggactaaaggatgttttaccttatagtcaaaagactgtcagccagctatttgataataaaaatccccaaggcataaaaccacgctcttggggatgggaccttcggtttgatccaaagcaaaattatccgatcattttgcacacgggttttactggtactttaattattcttgatcgcatcaaacgctctggtctaattttattgaccaatcgagtccatccgactggacacaacactgttttcttagctatgcgcgaaaaaattatccatagttttatcaacgaaaacgccaaaatataatttatagaaaaaagacggctgtgtgtcagtcgtctttttatctctcactaaatttcatcatccgtctagtattataacttattttaacgctaatgtactagtcaaatattatttttctgctttaaacattttccagtagctaattaaaatgattaatgccattaataaagtaaaataaaaggctgcctgactaccttgagctgtcgccagtgcataggacgctgcaccctttttcggccaaatcgacataattgctgctaagatagttgttcctacagaaccggctaattgctggctagtctgacaaactgcggttgcatcggcgcgcgatgctcctttttctaccttcaaagcttcagctagcgtgttagaaaatgacattctgtgtcctaacatcatgatgccataaataataatgatcatcatcacagtcaaatttaagccaaaaatagcaaataacaagcagctgatcgccattaagaagccacctaaataaagtggcaatttagctccttttttatcatataggctaccaaaatatggattgagtagccctgcaataatactacctggtagcaaaatcaaaccaccaactaaagatgtttgctttccgacaatttggatgtagttaggcaatacaaaactgataccaatattattaaattgcaataaaaagtaagctaacgcaccataaacaaacgctttttgcttaaatacggctagatctaacaatttcttggatgattttttagataatctaacaaataaccaaattaaaattgcagtcacaattaataaaatccacattaaaggattagcaaatccattactaatttgatttacgcctaatgtcaaagtaataaatgctatagctaaaacgataaatgatagccaatcaaaactatttttagtttgttcatgatacttaccgactacaaatagcccggcaacaaaaacaatgatcgcaaaaattgtaacaaaaccaaaaatccagcgccagttaagataaaaagtagtgataccgccaaatgctggtcctaaagtcggtgccatagctactactaagccggcgattcccatgtaaacgccccatttttcgcgaggcataacttcggttactaagttaaacatcaacggtgtacttaatcctgcacctagagctgaaatcagccgacttaacagtaaaataggaaaattaggtgctacagcactaattacgcttccaatcataaaaccaacgcaagcaacaataaacaattgccgcgcagtaaaacgttcattcaaatatgaagaacaaatcataataatcgcaatcgccaataaatatcctgttgtcgtccattgaattatatccaaaccgacaccaaattgcttcatcatcgtaggaaaagtgacgtttaaactagtttccgtcaaaattccgacaaatgacataaacgcagctgataatactgctaaaacatttttagtattctctttcacacaaaaatcctttccacaaaaaaagaaagagcaaaaaacctttgtttcctactctttctttaattagcacagctaattatattaatacgcatactatcaaatatgctgagtatatctaatattaaagacgcttagctaagtcgtcgtgtaagttttcgtaacctggcttgttaagtaaaccaaacatgttacgcttgtaagcttcaacacctggttggttgaatgggttaataccgttcaagtaacctgaaatagcaattgctaattcgaagaagtaaatcatgtaacctaaagtatgtgcactttggtctggaatgttaacagtcataactggaacaccaccatcggtgtgagccaaaacaacaccttcataagcacgatcgtttacgtagttcaagctcttaccttccaagaagttaagttggtcaaggttcttttcatcgcctgggatcttaacatcatgacgtggattttcaacacggataacagtttcaaataaattacgtaaaccttcttggatgtattgaccaagtgagtgaaggtcagtagtgaagttagcgcttgatgggtaaatacctttttgatccttaccttctgattcacccattaattgcttgcaccattcaccgaacattcttaaacttggttcatagttttcaacaatttcagtagtgtaacccttacggtaaaggatgttacgaagtgctgcgtattggtatggagttgcctttgacaaatcagtatcagtgtagtcagcacgtgcgtctgcagcacccttcatcaattcgtcaatgtcagcacctgaagcagcgattggaagtaaaccaacagctgaaagaacactgtaacgaccaccaacatcatcaggaactacaaattcttcgtaaccttctgcatcagcttcagtctttaaagcacccttttgacggtcagtagttgcataaattctcttagcagcttcttccttaccatacttcttgattaacttgtccttgaagattctgaaggctactgatggttcagtagtagtacctgacttagaaattacgttaacactgaagtccttgtcgcctaaccattcaatcaagtcataaaggtatgagcctgaaagtgagttaccacagaagacaacagttggcataccgttcttttccttgccatagaaattgctgttcaagaattcaattgcagcttgggcaccaaggtaagaaccaccgataccaatacaaatcaaaacttctgaatctgattgaatcttcttggctgccttcttaatgcgggcaaattcatccttgtcatagtcaactggcaaattaagccaaccacggaaatcgttacctgcaccagttccatcgcgaagttcagtattagcagcgttaaccatagcttgcatttcgcttaattcattttcatgaacaaattgtgttagtttactactatcaaatttaattaaactcataaatctgcttcctaactaaataaaatatttttcacaaacctattttaacaatcttgatttataaataccagtacattataagcgcattcaggcttttttgacaattttaaaaatcacataacccaaaattgctccacaagtattgaagaaaacatcatcaatatcgctaacccccgtcaccagcaaaaactgcagagtctcaattcccactgaaaacagcatccccatcagtaccgtccttaaaaacgttgctctttttgaaaaaacaatggggaaaaaaatgccaaacggcacaaagcacaagacattgccaaaagaattataaaagaaatccaaatgactgggagcatagactaatttccaagtttccttcatgaataccaagttaatatcactcaatggcctagagaaattaaaatcaagctgccacggaaagtaggtatttctaaaagttgtcagcatcaaaactaagattatgtaaaaagaaaagacccaaacgctagcttcagacctaattgatcttctgcggcgcaccaaaagaagccaaattaagcgcaatacagcaaaaattaaaaaataaaatattgttttatccagcgctaataaggttaatttaactaatgcaaagtggttaatattagttgcatactgtttagctaaaaaactataaagtgggcccaaaaatagcatactttgcctctttccaaaatattcattatagattatacctattttcacggctggaaaatcttaaaaaaaagataactcttagcaaattattgttttaaaagaggtgaaccattaaaattaaaagatgttaaaggagcattatatggaaaaaaagaaaattatcagttttattcaaacacgaacgggctttttaacccttttagttgtttgtttctggctgaaatatatttttgcagcttattttgatttcaatttaggcttgagcgacccgtatcaacatttcattatgtggctcagccccgtagggtccgccatcattttaatcagcttcggtttttatattcctaaaccgctgatctcttacatcacaatgttaattttagactttgccaatacggcattgctttttgcaaatattatctactatcgtcaattttcggactttttaacaattaaaacgatgtctaacgttggtaaagtttcgcagggtctaggtaaaagtaccgttgcccttctgcatccaacagatattattatctggattgatttgatcgttattgttactttactgatcattcataaaatcaaaattgatcaaagatcttacggcttatccaccccatttgcgattacctcagtaggcgcatttgtcctaactcttaacatttttttggcagaaacctctcgtccgcgcttattgcgcaacacttttgatcgctcctatgtcgttaaataccttggtattgacacctttactgcttatgattgcttcaagagtgcgcaaaatgttcaagtcactaaaaatgccaacgctgcggacttgaaccagattttaacttttaccaaaaaacaaaatgctgctccatcttcctcatattttggtattgagaaaaaacgcaatgtgattatcatccacttagaaagtttccagcaatttttaattaatcttaaggttaatggcaaagaagtgacgccgttcctaaattcactttatcaaaataaacatacgctcagttttaacaacttctaccaccaagttggtctaggtagaaccagtgacgcggaaaacatgctagaaactagtacttacggtattcccgacggatctttattcacttctttaggttcggaaaacacctttcaagctgcaccgcaaattttgcgtcaagatggctatacttccgctgtctttcacggcaacgtcggtagtttttggaatcgaaatgatgtttataaaaatatgggctataattatttctttgataaaaattactatagctcccaaagtaaagatgcaagcggctatgggttaaaagataagctgctttttgccgaaagcgttaaatatttagagcagatgcagcagcctttctatgctaagttcattacggtaaccaaccacattccgtttaacttagataaagaagacaaggaccctaactttaagactacaaacactgccgaccaaactatcaacaattactttgaaactgcccactacctagatgaggcattgcgtgaatttttccactacttaaagtcttctggtctttacaaaaactcaatggtagtcatttatggtgatcactatgggttaagtaattctgaaaatgaaaccttagcaccaattattggtgaaagctctgacacgtggaatacttacaataatgttcaaatgcagcgtgttccattcatgattcatgccaataatttgaaaggaaaaattaatcatgaaattgctggtgaaattgatgtcttgccaacactgatgcatttgctcggtattaacaataaaaactatgtccaattcggtagcgacatgctttcgcctaaaagacaaaattggatcgtctttcgtaatgggaccattgtcagctccagatatatcatagttggtgctaaaggaatcaaaggtaccgtttatgaccgagttagcggtaaacaaatcattaattttactcctcaagagaaaaaagaaatctctgagctagcacaaaaggccaaggcatcattagactattctgacttattaaacaaccacaatttgttacgcttctacaccccaactggctttgtccctgctgatccaacccaatttgattattccgtcaattatcaaaaaatgatcgctatcagaaatgaattagctggcaattccacctcgctttatagcagacatcgcggtacaactactaatctttaccgtactgatgccgctgaactaaaagatagaaaacaagaaattacccaagttcctgacagcgttaaaaatattaaagagaatacgaaaaacaaaaatagttcagaaaataccaataactaaaaagaacgcacagacctttcaaaaaaactgtgcgttcttttttagtttttagctacaaactgttcatagcccttgtcataaaaggtcacggtgaatgtggaacctttacctggtgcggaaaatacttctactttgccaccatgttgcttaatcaaagaagaaacaatcgcaagtcccaagcctgattcgccagttcccattcgagcacgcgatggatcagccttgaaaaagcgttcaaaaatatacttagtctgattcttgctcatgccaataccattatccttaaccgataattgtgttccatgctctatccgtttacccgaaataataattttgccatcatgagtgaattgaatcgcattttgaactaagttaaccattacctgggtaaaacggtcacgatctgcataaataggcaactgatcaggtgcctctacaaccagctcatcgttggctttagttgcattttgttttaattgcgacttcaaatcatgcagaataattgtggcattaaagttagtcttaaccagcataatttgattatttcgaatcttttcatagtccaaattttcattgactaaccgaattaatcgtttagtttcgcgctgcattaacgcgattgacttcggtttagaatcctctgggatagcatcgtattgcaagccctctagaatgccattaattgttgtcaatggcgtccgcatttcatgagcagcatcagccatgaattggtctcgtcgctcttcttgagccttaacctcttcgttcgactgcttcaaagcctgcaccattttattgaaattctcagccaattgatcaatttcatcgctatctttatgctcaatttgcacattaaagttacctgatgcaactttttgcgtagcacgtgataatcgcttaattcgtttagttgaataataagaaataataaagctcagcaacaatccaaccgctacagtaattaacaatgcacgcaacaaattgcgtttagccattaaaatcggtcgctcaacatgctttactctcgatcctatccaaacaatgccaacaagatttttgccattcatccatggaaccaaaacccccgtgtaggcatccttagttgaactaatcggtgaattttcattatgattattttgaattctaatctcttgcccattttttaaagtagtaaaaacttcttgtgaaagctgaattctagcctttgttttgggataaatctgctcatttttatcattaaaaatacgtaaatgagcatcatcaccacgaagaacatattctaattgattcaagaagttattgctaagcaatgcagtcccattttggctatcagcttccgccaagtttcccaaagaattagcatagctttccatccgctggtagttttgcgtataagcttgattacgcgcataaccaatctctgagtaaccaataatcgagatagttgtcacaataatgagtaagaaactcaacatattttggtaaattaatttcattatttgacctgcgaatcatcaaacttgtaaccgacgccccaaacagtttggatcaccttggcaccaaccttctctaatttctgtcgaagctttttaatatgagcatcaacagttctttcttcaccataatactcatagccccaaactagttctagtaattggtcacgagaaaagacttgtttaggcttttgtgccattgtatacagcaaatcaaattcttttggtgtcaaacccattaccggctgattatcaaataaaacttctcgtctattttttgaaatcttcaaatgatcggtcgtaatctcatagtcttgattatcttcttgagtatgagctggttcttcttccatcatcacgcggcgatgcaaagccttaatgcgggcaatcaaagcaattgggctaaatggcttagtgacatactcatcagctccgatacctagccccaacacttgatctgattcactgccacgagcagtaagcataataattggcactgtcggcgaaattgcccgtacctctttagctacttgaatcccatctttttttggcaaattcaaatctaacgtaatcagatcatacttatccgcgttctttttaaacatatcgacggcttcgacaccatcaacagcaatgtcttgttgccaaccttcttttttgaaaaacattcccatcatttcagctacggaagtgtcatcttcgaccattaatattctcaaactcattatcaatccctaaatccttttgttctcttatgcttcacttgatcaggatcgacatagtcatgtggcaattcatgtcgtttagacaaaaatgttttcaaacttttttcggtataaacaattggcaataagataaataaataaaatgttaacagccaaatgagaaaatagcgatcccaattcaaatagtgaatgattactcctaacagtgcttgaataaacccaaacaggatacaataccagcttgcccgtttctgagcaaacttaaaactatcctggttaacttgcgcaagataagataaatagccataaattcggttgggccttttggctggcgtaatcagccaaatcaaccctaccgccaccataactaagccacaagcgacatagatcacgatttctcactcctaattctgataaatttaaacggttattcctcacctggtgcagacataactattctcattttaccagtgaaagtgaaattcttcatctcatttggaataattaaattagttcccatcttcaaatcatatgacttgccatcagcttctaattttccttcgcctttgataacggaaactaacaggtatggatgatcctttaagccggtcttccaagtaccatcaaggtcaatttgccacaaataaaagtgtggtgaaagtggtggttcaaccaatgtcttaatttctgcatcttgatcttggctagtcttaacatctaacttaggatcaacatggggaacagtggtcacatcaattgacttttgcgtatgaagctcacgctttttaccatccttgcccacacgatcgtagtcatacaagcggtaagttacatcacttgactgttgagtttcaattactaagcatcccttagttaaagcatgaattgtacctgctggcacatagaagaaatcgcctgctttaaccggaacttttctgagcagcttatcccattcgcctttgtggatcatatcagctaattcttcacggctttttgcatgatgaccataaataatataagcacctggatcagcttgcattacataccaagactcagtcttaccagaatcattttctactttgcgagcataatcatcatccgggtgtacttgaactgataaattatcattagcatctaggaattttaccaataatggaaattccttggccttagggttgccaaacaattccggatgcttcaagtaaacatcccgcaatgacattcccttaagtggcccatctgttacagttgacgcgtcatccttgtaacctgaaataatccaagcttctccaacttttccttctggaatatcatagtgaaaaatatcatctaatttacgtccaccccaaatttttggcctaaagtatggggttaaaaataatggttccatttaaatcacctcaattaaagtataaactttaaggcagaataaatgaaacccttttcttagatatatgtatactatttgttttacatgtaaagctacttgttatacttacgaatacctgtagctaatctttgcatcccatccttgaccatcgtcaaaggacaagctagattaattcgaataaaatcatggccatttccacgataaacactaccagctgaaataatcagcccagtttcttggcgaatgaactctgctaattcctgtgaatcagtactgatcttttgcacatcgatccacatcaaatatgtcgcattgcccgaaatgatttgtacttcaggaatgtttttttcaataaaattctgcacatacgcaaaattttgctttaactgttttttcaaagcattaagccaatcatggccttgctcataagccgcaatcgttgctggaatcgccaataaattaggctcggctacttcatcactatttaaaccgcggttaaccatattgcgcaaattttcattaggaacaattgccgtagcagaatgaagagcagcaacattaaaagttttgcttggggacactagtgaaatcacactattttgtgcttcacctgttacagaaaaggctggcgtgtaatctggaccttgtctaaccaaatcaccatggatctcatccgatagtaatgttacatggtattggtgacaaagatccgcaattttttgtacttcttcactagtccaaacttttcctactggattatgtgggttacaaaaaatcatcaaagtcgttagcggctcagctaatttttgttccaagtctgcccagttgatcgaataacttttaccatcgaaagctaaatcactcgacaaaacatggcgcccattattcaaaatggaattataaaaaatattataaactggctcttgtactaaaacattatcaccaatatgtgaaatacggcgtacaattgatgaaatagcagggactactccagtagtaaaaatcatccaatttgtttgtggccgatgattatgttctgtttcataccaatcagcgacagcattaaaataatctgcttgtgggaactcataaccaaatgcacctaatgtcaatttttgttgcattgcctcgataatttcaggtgccgtcttaaagtccatatcggcaatccacattggtaattcatcagacttcacatcccactttactgaatcagtctttgacctatctggtgcattttcaaaatcatattgcatatatctcactaatcctttggtgtttggttcgtatcagaatgaacaatttttgtacctattttcggacaatcaagctcggttttagatggatctaccttatctggatcgataatcaaagtaccaatctcaggtaccgtaattttaccagaaattgggtttttaatactatcaatctttgtattaagctccacatctaaattagaaacatattcaaaagctaaatctgtatgaatcaaggaaccattcttaatctcaagctgatcaatgtagttcaagccctgatcactttcaattttacaattaattaacgtaatgttgttagtattccaagctaaatattcaccatcaataattgaatcgtaaatagtgacattattgcaattccaaaaagcatctttagagataaaagttgaattatgaacttcaatgttttctgcaccatcaaaaacataatttcccacaacggaaacgtgatcaagataaatattctggctatctttaccaaaataatcaccattaatttgagaattggtaatcttaatatcattacaagtccacattgtttcttctgcgttagcaaaatgaacattatctaaaataatatgacttgtccttctgaataatttaggtgcctgtaaagcactatttttaattgaaatattcttggtataccaaattccagaccgtgacatagtttcaaacgtggtattttcaactttcacattttcatcataccaaagtggatatttccatttaaaaattgaattctttaatctgatatttttagcttcttttaagggagattcaccactgccaaatgtaataccatcaaggattgcatcagttaatccataaagaattctttcacctgcaaaatatttatttttgtattccataattgtttccacctttttgttaatttaataatcattaattttaggacagtattcattatatgatttctttcatgcaatgtttaatacttatttttagtgataatgcataacaaaaatgcatagcagataaacgatttagcaaaacaaaaaaccgctctagaacaacatctagaacggttatctatggagatgaggggaattgaacccctgtccaaacgcatctcgtcactgacctctacgatcatagttatattacttgaacttcactagctcaaaacgccatataacagggctagaatgggctagctaacctgttaagactctttttaactattcaggtgaggtagttaaacgtaactcgctaaagttgatactcggtgtcagccacgagtaaaccgacaaggagcaacacatgcgcttaaattaagcagctaatgcgtaagaatttttgttatttgcagttatatttaactgtaacgtttttacgtagtcgtaacctacgaaccgcagtcaatgcgggtctacgcctgtcgaatcccaaaacatccccttgagatacttattcattatagcatagacacacattacatgcgataaaaatgcttaatcaatattagtcaaacgtaccacatcacgttcaatcatcaattcttcattagttgggataaccattcctgcaactttggaatctgtttttgtgattagtccttcactaacactttcattagcttcattatctacaacaacacccatatatgcgaaagcgtcaagaaccgcttttctcacaccagtatcatgttcaccaataccagcagtaaagataattgcatcaacgccgcccatttcggcaatataagcaccaacgtagcgaataatacgattaatgaaaatttttcttgctaacttagcccgttcgctatcactttcacgcacatcgcgcatatctggtgaaattcctgacaagcccaacaaaccagacttattattcatgatataaatcatttcatccatcgacttatgctctaccttcattagatgttgcacgagtgaaggatcgatatcaccggttctagtagccattgtaattccggcaattggactaaagcccattgaggtatcgtaagacttgccatccttaactgcagtaattgatgcgcctgatcccaagtgacagatgactaactttaagtcttttaaatctttacctagtaatttagcagcacgcggtgctgtatagcgaattgaagtaccatgagcaccatatttacgtacaccatatttttcataatattcataaggaagtgaatacaaataatgtactggatcaagattacggtgataagtagtatcaaaaaccgcaacttctggcacatttggtaaaacattcataaaagcttcaattccgcgagcctcagcaggattgtgaagcggagcataatctgacaattcgtagatcttaggcagattttccttagtaataatagtagaatccttaaagtactctccaccattaacaacacgatgtcctacaccgacaatttcagttagttcttcaacaacatggtatccttttaaaaacttgatcaataagctaactgcagcttcttgatctgggatttcagttttttcaacgtgcttagtaccatcagctaacttaatctcaaatgatgaatcttcaagacctacacgatcagccattcctttggcaagaaccttttcatctggtaatgagaataatttgtacttaaaagatgaactaccagagttaattgccaaaacttttttcataaaaattaattcttcttctttcaaaaaaataagtgctttatcaattaatgattaatctttgcataccactcgttaagtttaacattaaattgaattaaagtctcttcttttttcaaggaaccaagtttggtaagcaaaacttcacttgctttggcctcatcaccgtgattttggaaaactaaaactgactttggattaaacttgttcttaaacatatcatctggcaactctacaatcgccttcaaatagactttcttagttaaccatggcataaaatcagcgccaatcttgcctgacaaaatagacttaggaactaccaaaaaggcatagccgttaggctttaaattattaataatttgttcgattaacaacaaatgagcaaaagaatgacctttcttagcctgattttcaaaattcttggcattctcatcaactggataatagcctacaggtaaatcacttacaattgcatcagcgttaggacacatccaaggcattaaagcgtcttgatgatataactcaatgtcaatattattcagatgcgcagccacatctgtcaaacttaacatatcttcatcgttatcaatccctaccaattgataattatccttagaatgattgagtgccttaagttgagaaataattgaaaacaacaaattccctgtacccacggcaggatcaacgatttccatcttttgatcttttaataatttatgcatcaacattgctactactgtagcaattgcaggtggagtaggcatttggttaacatcaaagccatcatcattaactgcctttaaagttagaaaagtaaagacttgagccttttctttttggctaatttcgtcataatctattgcttgatacttttgacttaattcagccactgttttttcatccggtgcaccattttcaaccttaatcttgccactttctaagttatcaaaagtctctactaaggcttctgtaaatgaaacatttaatgccgtttgcaaagtttgcacacagtctaaaaactgattaaaaagtttttccaaattttccatagcggtccctccataccttaattattttatagaaagggataaagaggtgcaaggaaagtcaatcatccgttaagcattcgataattaggcgattgttctccatgctagcatgataaatatcttgatacattttgataaacaaaagcgtggtcattaaaactaatacactacttagtaaggcactgccttttacgttatgcgtctttttctttggttttagcatttttcttttcctgttcctcatcaagctgaaaaactaaatctgatgcacccttatttttctctgttaccctaataatgatgctatctttagtggttttaaaagcagccttttcaacgttaaataataacggcatatagcctttccctgcaccagatactttaagtacgttctttttatagtattcaattcggtaagtagttgcatcgcctttttgatcgatgcacttaaaggaagcactattacttatagctaatttagttactggatacactgccttaattttgtcagcccgcataaaattttctagctgtacataagcataggctacttcattgacatgctgattttgattcaagtttgcttttttaacactcaacaataaattttgtaaaattagcagcaccatcatagtaataaaaagcgaaaacattgcttcagctaacataaaacctttactctttgaccgcaaaagtttgtttagtcgttgcatcccaaacatgattacgtcctgccttttgataaattcgatcgtgaactgttacttgctccaggtcagttttagtcagtatatggtaagcataagcacgatctgtttttaattccatctcacgaccatttttctgattttcagctacagttatataaaagcaactaacagcaatcacagcaattataattgctataaagctctcaattactagaaatcctttaacttttatcattccgctactctcccccacagcatttgatatttcaggcttttttccattccgtagccactaaaagtcaccgtacctggtttagaataaccagtcaggttgaatttaaaatgatccaagccagtaattttgatattttgatcaactggaatacttttgtgatattttccgccagagaataaaatttgattggatttagctagatatgatacgcaaatagtaacctccttgatcgtactgtacctcgaagtttgatcaagtgccgtcgtaactcttttaacagtattatcaaaaatcagtttttcttgatatctttttaactgcaaactaccaatcaacaaaatgccacagcaaacaccaagtgtaattattacttctagtagggaaaagccggctaatttatttcttttcaacgacttcgccactatctaacgtgaaattctttttagctttagtaatttgatcaccagttaagtaatcgtccttttttagatcttcaaaatctttaggttcaccatatttatccttatataactcaacttgcgtttgcacagtagtcctaaatgcatccgcagttttagtttcagcattcttcttttgattaatcaaattaggcacaattagcaaaatcaaaatcacgataatggcaattaccacaaccatttcaatcaaagtaaaaccctcttgcttgcggcgcttagccataatgtttgctaaatacttcttcatcttctctttcatttttaacttaatcctcttcttcactctatttttttacttttatctttaatgtcactttttctatagtccttgcatcattgaatacattggtaataacagcttcaaatacattccaataatgcataagccaattaaaataaaacaagctggttgaacattgacgactaatttctcaattttttcagttaaatccaaaaataggctacgtcctaataacaaacagcgcttactcaagctctttcgctcagagccagtctgcaataaaactaataaactattaggcaaaaaatcctctgcattaataatttcttctaaattttttccttcagctaaatcgtgccctatcttttgtcccagtgcttgctgcaatgaacctttctcttgatctgccgcatattcgcacattcgctgcaatgaaaagccactagctagcagcagtccaatgtcataaaccaacaaataatgaatatacagcataactacctgcccaattaacggatatttactcagttttttcattgatgaataatcctgtttattgagcaaagtaacgatcttagcaaaaaaatataagcccagcaatacaataatgatcagaccaatcatgaccatatctcctgaatgatcactgctatcgctgaattgtgtcgaaataaacgattgcataaagaccagtaaaatcaccatcattatcgctaaaaccaacggataagataattcagcccgcagttttttcatctgctcctgttttagtcgattcaacgttgctaaatgctgcaaacattcaactaggtttccttgctgtaaagccaaattaacctgagttactgtcgttttagaaaagcctagtttaagcagttcagtactaaaacttgctccttctttcatgcgactagccattctttccatcaactgacacctttttggccacaatgccggcattaattcaattgaattgagcaaagaaaaaccattatctaaactatgttttaaataatccaaaaaggccaattgttcttcgccatttaacttatcctttttggaattgccaatatacttcatgattaatttctcctcctttccacaaacgctctagattttcctgccaattaacgaattcaccacgaaccgatttgcctagctctttttttagcaaagaatctgctgcaatatccatcaagcactttaattttccttgactgactaataatcgctgatacgacactgcagttagacaatttgtcagttcgtcacacctaatacctaatccctctagtcgagaaatagtttgcaaagtacttttagcatgaactgtcgcaaaaaccaggtgtccacttaaagctgcatcaactgctaaacgtgctgttccttgatcacgaatttctccaataattaaaatatctggacgatgccgtaatgccgcctttaacaggttttggtaatcaattcccgcttcgttattgacttgtgcttgcaaaaaagaagactcatgaatttcaacaggatcctcgattgtcatcactactttgttttggctcattttcttagcaatttcatacattgtcgttgtcttgcccgagccagttggaccactagtaataatcaatccgcgactcttagccagcttttcaattgttcccagctgctctggaataaaatattgactatggtcaatcccatagatgactcgaataaccagtgactcttgatcggaaaaatctcctaagctagataaacgcaagaaatattcatgtccttcattctcatatgtcattgcgccaacctgcgggcgacgatgttctgcaatatccatctgagcactgtacttaaaaaaattgataatttcctttcccgtctccaaagtaaaacctgcatattcaattagacccttaccggtccgaaatttaaccatcaagttttcttttttcgggaaaaagaaaatatcacttgctttaactttaattgcctcaatcaataattcactgacaatttctttgatcttcataaaaatcctccttttttgcctcacattatttattacgcaaaaaaaatcgatttttttgtgagaaatttaaaaaaacacaaaaaattttctcaactctaaaaaacgttgatctaacagcatttcaagattaaaaaaccattaaaaaagtacacaaaaaaaatagcttagccattggctaagctatttcatcattaactaattaatcttcatcagccgctgcagtataaacattttgaacatcgtcactatcttcaagagcatcaactaaatgttcaaattgttccttcttatctgctggaactggagtggtgttttgtggaatcatagttaattcagcatctgctagtttgtaaccatccttaattaaggcgtcacgtacacctgcaaattgctttggatcagtgtagatttcgtatgcatcatcactagtttgaagatcgtcaccaccagcatccataacatcaagtaatacttgatcttcatcagcatcagtagttgaacgatcaattacaatgtagcctttacggtcaaacatgtaagcaactgaaccagtagcaccaagtgaaccaccgttacgagtgaaagcaacacgaacgtccgaagctgtacggttcttgttatcagtcaaagcttcaacaaagactgcaacaccacctggagcataaccttcgtaagtaatttcgtcgtagtgttcttctgaaccaccttcggccttcttgatggcacgcttgatgttatccttaggcatgttgtttgaacgtgccttatcaattaccatacgtaatgtaggattcccatcaggatcaggaccaccactctttgcagccatataaatttcacgagataacttttggaaaattttacctctctttgcgtcttgcgcattcttgcggccttgaatattgtgccattttgaatgtcctgacataaggatccttctttcttttttctaatattaattaacgatattatcttaactcacagcacctcaaaattcaatggtgtcaaccatttaaacttgttttttctggtcaaaaaatctgtgtttaataaacaatactagcattatcagcaaaattgccgttaatgctcctgctccatcaagcattacatcatgcacgctcggtgttctatcacctgttaaaaattgatgatattcatcaaatacagcaaatgcaattgccataaaccaagttaaaactggtgctacccatttgattttgaaaattcttcttaatcctaaatagccaaaaccacctagtaaaaaataagaaccaaagtgagccattttacgtaaaacaaattgggccagccctgctcgaccatcaacttgcacattgtgaatacgaccaccgtaagtaaaatcccagccagcaacgatattctctaaccagccaaaataacggttaattttattgtcatgaatttcctgctgttgataagtcattgaactagaaatgaacaatgcaactagcaccaataaagcaagcagtaaaaagattttttctcgtttagtaaaatgaaatttatccattgctatcaatgtcattaagttaagacattgacaaattatcgacttggacttttaagatcattcatttgcgatttatcgcatttgaatgctcttttttcatgccaaataaacccaaatcttgtttagaaattaggctacacgatataaataatatacagctgatttgggtttgagatttcttttgtcttttcgtcctggtctgatcggaattgtgtaatgactaatttgaataagaatctttttaaagatttcagttgaagaagaaattatatacatagcctggatgacaaaacatgactgtttgaaattgatcgcatattgatacttgcattttttttgtggtacatatgcttgagcatcaatttgactgactgcgttaaacataatcatgtgggcatagatctccatttcaataaatctatcctgcttggaatgaaactgtacgctacctaaagcatatttcaactttttgaatgaagtttcaatgccccagcgcaaatggtagatttctttgatcctttttaagggataatcggctctatttagattagttagaacaacttcccattcttctttgcctgatttaggatcattaattctaaatttacaggcacgaaattttattgtacataactctccaaagtcccagctgccatctttggtatttttagaccgatattttatatattgacggtaatgatggttaaccaaatgaacgttttctgtagccttatgggtttcataataataattagaggtagtcacccagcaagctatatccttatcacactcttgattaggcaactcagctacttccttaaatgcgccatatcccgttttagtacgtatgacataataacagttaggcaggcgattacaattttcaatcatgttaaagccggtataacctcgatccatagtaactatatatggtccgcaatttagctttttaagcatttgaacggcggctttacgttcatccatctttgacttaggctgaaagatgcagtcttgataagtattatttaacaggtcatagagtgcattaacatgaatttggcaatatggctttcctttatgattgagatttccaacgatattctctgatttaggattccagatttgattaaaatcagacccatcaatggcaaatatacgatatttatgatcaaataactggatattaaataaattctgattaaatacagttagaatatgcttaaaacatgcgggtgaaagctgacctttgcgttggacataagcggaagtactgactactttatcgttatttttaatagctttttggccaaaagctctaaacaactcactggtcaaatcttttccttgcatattaatagtagttttaatgactgtagctgcatctaaaaaccgcttcctagtgaaggcatgaggatcatcgataaaatcatgaatatgctttccagtatcattgataatttgatcaagacgatctaaaatatttctgtgaagggctttcataattaacaccagctttctggcaataattttgaaggtttaataatttaatcagagggcgaaaaggtaggttcttttcgcctttattttatgcaaaaaaagaaccaaatcataatgattcggttctacagagattagattcaatttgtcaatgtcttaacttaatgacattgccattgctatttcttctctcttttttacttcttactttaacaaaaaacgggttaaacttgacccgttttataaattatttaactttgcttaatgcttcatcaattggtgtgtccccatcatgcataataattacttgatgaatcgtattatcatactttaggctatcaaccaatacctgagcaacatcatcaatcgaattttctccaccttctggagtaaatgatgtcttacccgttgctggcttctccattaagttacctggttgaatgatcgtataatccaaattagtattatgaattaaccattcatcagaaaagtacttagcaatatcataatcaataatgcttgcaagagaaggaatttctgcccacttgtcttggtcaagcgcaaaggcggagcttagttgaacgtaacgcttaacgccattagcttcagcagccttcatcagcttaactgcgccatttaagtcagtttgcaataagtcctttccacgagaacctgctacaaaaatcactgcatctgggtgacctaattcttcggtcagcttattaagcgaatcatgaaaatccaaatgttgcacccgcatattaggagaaataatttcaacagtattttctcttcttgcacctgcaattacttcatagccttcatctatcaatcttttgattacttctttgctcactctgcctgtagcaccagctacaaaaactttcattgtttttcctttctaccagctagccttcttaacacctggaagttgacccttatgagctaattcacgcatacattctcggcataagccaaacttccgataaactgaatgcggtcggccgcaacgttcacagcgcgtgtattgtctagttgaaaattttgtttcttttttgttacgaataatttgtgatgtttttgccataaatacctcttatctgcgtctatttattctttgaggcgctggctttcttttgctagttaatagtcccaacgccaaaataataattccaattgccaatacttgtccagtcattaacatccccacctttctttttgactcttactttttgttggtgtattatacatgcttacctataataagtaaagagatttgattgtaaatagaaagcgttttacactagtctgatacattccctgtcaagtagacagtagaattacataaagcttttattcctcagttgattaataatcagctgaggattttttggcttctcttattttcttttcgtgtattttttgccagtatttctcaattcgatgatttggtgcaatagggcaattcttaatattgcctttcatcgcttctttgcgcatttcaccagcagttaaaccgttaaaacgtttctgtggatcttcattaatgtagtaatctattgtcttacaaatagaatcattaagttcatcataactggccacttgaggatgaagaataactcgcatttctttgataatgccttgccagccttccattggaccattatcaatacagcagccaacacgagacattgattgcgtcatgccttggtcttctaattggttttggaaaggtgcgcgagtaaattgaaaaccacgatcactatggaaaagcggatgagcattagggtatgctttaacagcctgcttataggctgcttgaactaaagcagtatcgtttcgtttactaattgcgtagccaacaggatagcgatcatatagatcaaacacagtacatagatatgccttaggcaggttagcagcaacgacttcagtgatatctgtacaccatttttcattaggtctagatgcattaaagtctctttttaacttgttttcggccgttttctcaggcgttgtatgcttgaactttagcttctggtatctaggcttttgtgatctaatgccattgatacacatcaagcggtaaacagttttatgataaaccggcttttcatcagacatctgtcgattaactgccatggtcatcttttccgtcccaaacagactgttgttagacttagttatttcaatgatctttgcttcaatctttttgtctcgttcttcacgcttactcggcttgcgcttaggatcaaagtatttgtaataagctgagcgtgctattttagcccatttgcacattaaatcaatcttccaattgtacttttgatggcagtcatggattaactgatatgtttcttgtttccagcgtctttttattgcggcttgtctgtatcttggttgtccggcaagcacatcctttctaactgatctaatttttttaggaattcgttcttagtttgttcttctttgagctgacgctctaattccttaatttttcgattagccagttctaactcagttagctcttctggcttcttatgtctgcctcgtttatctgttaatcctgtttcaccattagctagatatttgtgtgtccagctgtaaacctgctggtaagaacaatcaaatttgacagctgtttgagtgtaattcttgtcgtgattaagacagtattgaacaatctgaattctttcttgctgggtagtttttcttcttgctttagtcatatagacctccggatggggatcatagtcccgattttctatatgactattatacttggaaacccattctgatactgttccattgcttctaatgccatatttattagctaaagaaggtaacgacattttgccagctaaatattcttgaacaaccttttctttaaatgccttagagtaatgattattgtattgagcattacttagaagggtatcacgattgctttgatattgatgaacccatcttcttacttgcatcgctccacttttacttggcatcttaagccgtttagctatttcaacgctgctcctattaccattcaagtattgttcaactgcccatatcttttgatcgaatgaatatttactttttctggacataaaaaatcccacctccatggataattgaatactttatgtatttaaatcgtccactttagtgggattgtatcagtcacagttctttttaataggtaaaatttatttgaatactttcatctaagaaaggaatagaatgaacgaaaaatgtaaaaataagtcgccaggattcttatctttttagggagtaattatttttaaatagagaaggatgagaattaattggacgatttaacatcaacaaataaaatgaaagccatcacttggcctgttttgaccttgatggcactttgtactgttatcggcttggacgatatcatgtacaacttccaaaaccaagggatgccagttatcacctcttggattatcatgtgtttgctttatgtaacaccttactcattaatggtaggacaattaggttctacgtttagtgaagaaggtggcggactttcatcatgggtccgcggtactgacggagaatttttaggttacttcactgcttggacatactgggcagcctcaattccttatgctgtagactccgctaacgaaatcattgtcgacctaggttgggcattgaccggttcaaagggattccaagataaaattcctactaccatgtttgctgctttgactttcgttgtgttcattgttttcattatcgttgaacaccactttgccaactcaatggaattcctttccagtattggtggtggtttgatggtcattatgactgtcttgtttgttttccttgcctttgttggtttggcaaaatcaggcggtcacatggctacccaaccatttacttggcacacaatcattcctaaattcgacttgcactactggtcaaccgtcggaatgttaatctatgccatgaatgggtgtgaactggttgcaccatatgtaactaagatgaagaaacctaagtcagacttccctaaggcaatgattactttagctatcatgactgctttcttaactatccttggttcatttgcacttggtatctactttgacgcataccacattccaaacgacttgaagatgaacggtgcttactacgtattcgacatggttggtaaacaattcggtatgggtaaattcttgctttacctctgggcttggacatcattattgttcaactgtgccttggttgccgtattgcttgatgccatgactagaatgcttatctccgacactggcgataagtacatgcctaagttcttacgtaagaaggacaaaaacggcttaccaattaacggttacatcttaactgttgccctttcatcattcatcatgatcttaggtatcttcttacctgacatgaacgatatcttcaactggttgcttaacttgaactcaatcatttcaccaggtgttacctgctggatcttctactcattcatgagagtaagaaagaactcaaagaagtacccatcaaaatatgtctacattaaaaacgataaacttgcttggcttgttggtcttgccttgttagttgttactgccgtagcaaccatccttggttttgcaccacaagatgttaagcaaggcagtggcctttggtggtacgaattgatcattaatattgtagccgtaattgtcttaattggtttgggtgcaattttacctggaattagacgtcgtgaagaagaatacggtattgcttttgacaaatctcaatggatttggatgggaattatcattatcggttctattattcttgacgtatggcttggtagtaccaagattccagcaagaatcacaatgattatagttgaagctatcgctgcattaatcattacttggattgttggacgaagaaaaccccaacaagcaaccatataaaaactaaattacaaaaaagctcgcaaataatgtcattaattatggcatgctttacgagcttcttttttgctcaaattgatatcactttcactctatattctataatcatatagtaatttacaattattttgtaattttatatactcaacaaggttagcactaagtgttatactaaagtataatggagataaggtatatatttatagaattatttaaactgagactgaataaaatgaaaaatataagaaagaagattatagtatttctgctagccttggaatgcttagctttttgtatatcctttaatagcaaagtgtatgcatcatggagtcccgcttcagaatggaaagaaaatggctatcctactgaggactggacaacagatcaatttacataccatcaaataggatttattaatgatcctaaaaataatcaattgttgttatatgtagacatttgccctgattctaaaaccaatagaaatagtcatggatatgaaggtggatatcgtcaattgcagccatcagcctacaatataaatgttggtaatgctacatacagtgttaatttagatgtcaatccatggaatattcaaaatggaaaatctggatatgcaggaattggagtatgggatcctcaaactaatcaatataaagcaactaaagataatctctgtcattattatgcagatagtgatggccgccaatcggccataattaagattccttacaatatgtttaacagagatgacctaaacggatcaactaaaatgacaatgcaaaatcctaatttgggtggcaacacaaaaatcacaatcagcggagccagcaccggcccatacatccctgccatcatcgcttttgtcttagcttcaatagccgcaattagttattaccataaaagaaagttagtacgtcatgaacatcagtaaaatatccccaaaaatatttcattttggaaatggtgtcatccgtgcctttttctttggcttgattataattagcttcttcgctgtgctctcatctactaattggctgccagatgcaaaaactacgaccggcttaacttacataatgtttgcactactattaattttagttttaagctggttctcctttccaaagtttcaaatgttcttaaaaacaatttttatcaagcataaatggattacttctattatttgtttagtccttgcattaatttggcaaattcaatttgtctacttcgtacatcccgcaatcggatttgatgttagtgctgttcacaataccataatcaatccgaatctacctgaattaagaggatatttcagtgttaactacaacaacctatccatcctccttactctaagacaagttgccaatatctttcattcaaccagttggttaacaatggctttatgttcaacacttgttacagatttaagtgttttagtaatcatcgctacaattgcgataatcaattttcaaaaaattcccaatatcatttatattctagctagtctgcttagcatattccctatttgcatggttccttacacagatgtatggtgcttgctccctatttcactttcaatttttggctggagcatcgctacccaaaaatcatatctagttgtcattcgttttttaggagcaattttatccggaattagcttagcatgtggcgtttggatcaagccttcagttgctgtttggggtattgccgcgattttaacgagtttactctatattttaaaaaacaacaaagtaattctaacttctattttctgtttaactattgcagcaagttttgttttagcctatcaacctcttaaaaaagcggttcaagatcagcattacatcatcgttaatcaaaaacgccaaattccgatgatccacttcatcaacgttggtttaacacatgatggtgcctatgatccaaaagcagctttaaaaatggatgagcttcctactaagaaacaaaaagttgtctattctaaaaagatgatcatcaagcgtcttaaaaaacgcggtccattgggttatttacaatttctagttaaaaagcaaggtctaaatactgcagatggtacattcggctggctgcatgaaggccattttattatttccaagcagccatcagaaggctggcgaggattcttagcggaatttatctatccaaatggaaaatatgttattgagtttagatttatcgctcaaattctttggacaattattatttttgtattgctattcagttttcaaaaaggcggctttattattcaaacgctaagaatggcactagttggcggttttatattcttacttctttttgaaggcggacgtagtcgttatctagttcaattcttacctattatcttgattttaacagcactttcagcagacactgctaaatataatttagataaaattttgacagcaattctaccgaaaagaggtttttaaatatgaatcttagtttaatttaccctactatctctttaccaatcattacaattagcatggttgtaactcaaacacaaatagaaaaagtatgggagaaacagctagaagactggcgtcaccatttatttatcatattgtgttttactactttttacatactccaaactgtttgtattgcaaatgtaaccatctttacctttaaagcaattgcttatatgtatgtcattccaacaattatggtattacgcaacaagcaacatatttggtggtttttgctttttatcacaccactaattccgttacttattggtcttgatttaaagagatattcatttataaatatccccgctactttattgcagatttcatccatcgcattaatctgctttattctaaatcattgtcaaaatctttcatatcaagttaagtatatcattgccctttattcagggagtctcatccattttgtacgtctttatatagaaaatgaattacacctcacatttttaatcgctttgacaatcggaactactttcaccatcattggtgaaagctggcgttattattttgaaagtcgacatgaagaagcaattgctaaattgcattacgaaagcaagcgtgatgaattaactggtcttcttaactttcgcgcttttgaccaagaaatgaaaaatttatctaaaagacctaatataactaatacctatattggcgctattgatatcgatcattttaaagtaatcaatgatacctatggtcacttaaatggtaatattgttctgcatactttttctaaaaaactgaaacacgagattgataaagcttttgctcctaattgtttcgtttaccgctttggcggtgacgaattttcaattgtcatttttaatgctaatcctgaacaaatcatcgctgcactaaacaatgttgaacaatatttccgcgataattttatcaaacttcctgataataaaactaaaataaagttctcgttttcatgtggcttcacgaagcatttatctaatgaacatttttataacactcttgaacgcgcagatgatttagtttacaaagtaaaaaataatggccgcggaaaaatattgactgattaaaaaactaaggaaatgaataatgcttaatggatatttaattggcgggattatagtttggttatatgccctttcagtaactaatcgtgcacatttatttgctttttattattgggttggtgctattggtgcttttcttttaactacttttgcatgccacaaatattttgtctggttcctagctagcctagtgagccgcggagctggtgtgattggacagctgactcatagctttactgcttatccgtttccagctgctttagacattcaaactacttttggatcaattaccctattagttgactatgaatgttctggaattattgaaacattggcatatttaagcttattaattttctttcctatttacactcgtcgtcaaaaggttgctcttagcattatcggtgttttttggatctactttattaatatttgccgattaggtttaattgggataaccgttcattaccttaatttgcgaaccctgttctgggttcacgacgttataggacgtatctttttctatatctttacaattcttctatattatcaagtcttcactcattcacaattagtctcaaacttactagggcgaagcaaattagattaaaaaggaataatcatgtttgatcaaacagtattacaaatgggattctgggctacttggcttttaattcctgtcatatttgaagaaattccgatgataattaattttattcggcttcttcatcatcataaaattcgcaaaaaaacccctctgccagattttttgccagtattatcaattattattccgacttataattcatccaaaacactttatagatgccttaaatcgctagctgattcagattatcccaaaaatttactaggaattttcgttgtcgataatggcagcaaagatgacacctttcaagtctttgctaaagctcaaacggactatccacaattattgatgcggtggcttacttctcctcatggaaagtcttctgcattaaatgctgccatttataaagcaagatcccaatatatcattaatatcgatagtgacggtcggttggataaacatgctttaaacaacattgttaaaaaattctcggctaatccaaatatcgatgctttaactggaacaattttaaatgaatattttgaatattgccaaacctttctagcaggaagaaatattgaaaataacagcaatcatattttcacgctttctggtgccttttcggcttttaaacgcgagaccttaattagaacgtatctttacagtaccgatacaattagtgaagatactgacatgactttccaaatccggtacaatttaaagggaacgatttcattttgtgatgatgcaattttttattctgaaccaattagcggcttcagtgaactatatactcagcgacaacgctggcaacgcggtgaactagaagtcattaacaaatatttatcgcaagttttatcttggaaacaattcttcagtaattttcaaattcgtcgtttaatcattgatcacacagtcactttcctaaaaataatttggatgtttgctatttttatattattaggatttggctattcatggatatcattattgttttcttatgcggtaatttatcttttatatttatttttggagatttcgagttcaatttgtgtttacatatacttaggaagctttccagaagaaagaaaattttatcttaaaaatatttggatgatttttttactgcttttttataatttactttgttctttcattcgttgtgttgggattattaatgcttcaaccaccactacaacttggcaaggaattaatataattcaagaaggtcaacaggttaaccaaatcataaaaaaagatataagacaattattgaaaagaaaaaattatgacgactaaatatcatacttatatattcacaacttatttgaacgcatcacatgctattcgttggagtaaaggaatcgggcaggctcattcccatacttatgaaataaggtatagctttcatattaataacggcaaattgattcgtttcaatgaaattgaaaataagattgctgaaattataaaaaagtttaataatcaatttttaaatgaagttgagccattcaccaaagtaaatcctactttagaaaatttaaccgattatctattcaatcgtttcggcgaagaattaaataaattgaattgtagtttagatgaaatatctgtaagtgaatcaccaatgagaacttatcagatttcaattaggtaacagaggtaatagtaatgagtaagtggtataacgtttttcaacctatttatcaagtcgataaagatttaaatgtaacaatttcacattatgaaatgttattacgagatgaaaatgattccttcccaaataacgatttcttcagagtaattggaactgaagaagaaaatcaaaaatggattttagccgaaaaagagtcaatagatcaagcttttgctaagtaccctgatatctgtatcaatttaaacattgagcctattcaattcgcatacccaagcgtttggaaatttattgaaaatatttatagtaagtatggtaaaaaagtggtcattgaagtaactgaacgtcaacttcaagctggaaccttaggtaataaacaatttgataaatctttccaaagattccatgatattggcttggacgttgttttagacgatgttgattctggtggtcatagctttacttttgtagatcaccattctgatataatcagtgggatcaaattatcattactagacttcgatcctattagttctgatactactattaaatttattgatgcttgggctagctttgctaaggaaaaacacttagatctagttgtagaagctatcagaaataaggaaattgctcaaaaatttgctggtaataaacatattttccagcaaggttattactggcaacagggagtaaaactagaagacttaccaacggtttatggatttaagaagtaattacaaaaagacagaattgattgcttaattctgtctttttttacatgtatttatttaaaaatttgtttattcgcattttatattcatgcggataagtttcgaatgaacgcgcatgagctgcacttttggcaatccataactccttaggaccatttgtagcatgatagttttgatacaccattttagttggcacaaaattatcttttccaccatggataaatagcattggcttagtattcttttttaattgcttaactgcagatgcatcccctaaataaaagccaagatttgctttacttacaccgcttaatagcgtaactgcacttgtagctactgcttgcggcataccgtataaatcttttgcttcatgcatgaattcagctttcacatcactatacccacagtcttcaatatatgccttaacttgcttaggcatcttgaggccactagtcatcattgttgttgctccgcccatactgacgccaaaaattacaatctgttgttttcttccttcaattgataaatctttattgacccattttctaacgtcatatttttcaggccaaccatagccaatatacttcccttgactttgtccatgagcacgcgcatcaggaatcaaaacattatatcccaattgatgaaacatcgccgcatagggtgccatggtatttttattattaccaaatccatgcagcaacacagcagtcttttcagaatgcttatttggaatataatttgcatctaagcggtagtttgaagaagcagacttaatataccaatgctcttttttagcgtttttataccactttttattctgcgcaagtgaatctttctttttcttgctagaatatttattcagcactgtcttttcacctggaacaaaagcaacattaaagaaatatgcttcaactgctccaattaaaacgattaaaactgtggcgactatccctattatccaccatacttttttgcgttttctattcaaaatgtcaactcctatataaaataatatagaattaattatacacttttgaattttatatggtatattgacattttaagtaaaatattgcctatacaaaaaatgatggcttacgccatcattttttgttattaatctaaatcttcaccgtgagattcaattaccttcttgtaccagtaaaatgaatccttaggcattctcttaagagtacctttaccttcatcatcacgatcaacatagataaaaccgtaacgcttagacatttgaccggtaccagctgatacttcatcaatacagccccaagtagtgtaggcacggacatcaacgccatcttcgatcgcacgattcattgccttaatgtgcattctaaggtaatcaatgcggtaatcgtcatgaatcttaccatcatcactaatcttatcaacggcacctagaccattttcaactaccatcattgggatttcgtaacggtcatacataacttcaaggtagtattgcaagccatctggatcagttgcccaaccccattctgaatacttaaggtatggattcttagcaccagcggcgaagttaccgccaaccttatcttttacttcatgagttgtgataacgttgctcatgtagtaagaaaaggtgtacatatcaactttaccttccaacatatccttcttatcttgctcagtaatgtctaagtgaacattgtgttctttccaaagacgcttagcaaatgttggatacttacccttgcattgtgcatccccacagtagaaaatattttgttcccacatatggcggttagtcaaaatatcctttggatctggggttaatgggtaatcaacgattccacaaatcatattccctaccacataatcaggatcaatttcatgagccaacttaactgcccgagcactagctacgaattgatagtgcaatttctgatatgcatgttggtatgccttatcatcagtcacattattgccaaaagcactaagcatcaacagggttgaattgatttcgttaaaagtaagccagtacttaactaatcccttgtattcttcaaacaaagtcttagcatatttcacatacatatcgatcattttacgatcttgccagtcatgatatttttcactgaggtaaagtggatcttcatagtgagaaatagtaactaaaggttcaatatcatattttttacattcttcaaatactctgcgataaaagtcaagtccagcttgatttggcttttcctcatcacccttagggaagatccgagtccaagcaattgataaacggaaggttttgaaacccatgtccgcaaacatcttaatatcatctttgtaatggtgataaaaatcaatcgctacatggttaggataatattcattaggatcaattgcaccaactgccccttcaggaagtcccgcacctggaactcctggtgttttttctaacttaccatttaacttgtaagtcaacattctaggtgcatctaagctacctgcagtagtaatatctgttactgataggcctttaccatcttcatcatatgcaccttcgatttggttagcggcagttgctccgccccataaaaagttctttggaaatgacattatgattctccttttctgaaagcatttacattaattatagactaattggtttgaacttgaccagttgttttaacttctgcgttactgccttgcaaagacaaaatttcttgaccaactttaacttcaccttgagctacttgctgtacagattcatatttcttagaattcgtaacaacaactggagtagtcacttcatagccagcagccttaatttctttaatattaaatttaaccaatggatcacctgctttaacctcttgacctttttctactaaagtcttgaagcccttaccttgcagattaacggtatccattccaatgtgcattaacacttctgcgccatctgtagtgttaagtccgacagcgtgtcctgttgggaaaactaaagcaatcttaccatcagctggggcatgaagcacaccttcgcttggttcaatagcaacgccttcccccattgcaccgcttgagaatacttcatctttaatttctgacaatggttttacttcaccgtctaatggtgaaactaatttggttgaaggattttccttttcttcacttaaaattgcttgtacaggagcactcttagtaatattagctgcttcattagcggcgtcagcaactttttgtgcttgttttttattatattcagcatcaactgattttttaccaaagagcatttgaagtgcaaaaccagctataaatgctacaataccggcaataattacgccgacaattgttgtcattgatcctcccttaggattaatgtaggccggaattgcaaagaatcccattgatggcataatgtacaatactgaatgaaaggcaccaatgattgcacctgagactgcaccagcaatacagcttaaaacaaatggcgtttttcttggtaatgtaataccataaattgctggttcagtaacaccgaacagtcctgagaaaaatgcaccagtagctgtttctttaagttttttgtccttagtttgacggataatagctaaaacaacaccaatttgcgcataacaaaccatgcaggataaacctagaattgggtcataacctaatgcggctaaatctgcagtagttacggcaacgattccccagtgaacaccgaaaataacaagtacttgccaaagagcacccattaataaaccagcaataattggactaaagttgtaaacacctgacatcactgcaccaattgcgtccccaacccaagtcattacaggaccaattactataaatgcaactggtaaagcaataatcatagtgacaactggaaccaagaacatttgcacaactgatggaatccactttttagcccagtgctcaataattgaagcaaaccaaacggtaaataatactggtaaaactgtagaagtataattcatcgtgataaccggaatgccaaagaaagtcgtgtgaatctctgaggcaaaagccgttcctttaaacaatgtacctagaacagtcttacttgcagctaattgaaccatagttggataagttaaggttgcaccaattgctaatccgataaattgattcatgtgaaatctacgtgctgcagttacccctaagaatactggtaagaagtagaaaatactatcaccaattgcatatagaatttggtaagtacccgatttagtagaaagccatcccattgcgcctactaaaactactaggcctttaataataccgccagcactaagtggagctagaatatctgtaaaaatgcctgaaatcaaagcaacggctttatccacaaagctagaattatcttcaacgtcatcatcaggaacttgtccaccgccattaaagccgccttctttgacaacagcatcgtaaacatcagcaacttcattaccaatgaccacttgatactgaccaccagctttaacaacagttacaacaccatctgtatcttttaaaacatcatcgttagcctttttttcatcctttaatttaaaacgcaaacgagttgcacagtgaacaacactggtcacattatctttgccaccaacattttgaatgatggtcttggctaattcatcatagttcttagccatttgcctttcctccttaaaataaaaacccaagctactcaaaaactaaagaacataaatgttcaacgtctttcagtaactcgggttcatgcctaatcttcttagtaacatacctaagtaacttagatatttaattatcttgacgactagttacgcgccaaatatgtaaaacaagataaaattcatcatctgaatctaaatcccatcccatttttgcatgtaagtaagtggtgatccgctccgccgtctcatacgctttgctatatttgattttcataaaacctagcattgcaggatcaagtgaagcctcctccttttgcttatttcgtaaaaatctaactaacaaaatgcgcaaatgcgaaacaaacctactatagttaaaggagctcgtatcaagttgcattgaatattgcaattgaataatatcgattatcccacgaatcaaatttgtaatctgaattgtttcttgtacttgagaaacatcactcttagcattaaccaggtgataggtcatcaaaaccgactcactctgcggcaatttaatctgcatctcctgattaattagattgaccacttttttagctgccgcaaattcttttggaaaaagattttgaacttcccaactattgttagcgggagctatatcaatatgatctttaattcgcgtaactgcaaaatcaatgtgatctgctaaagcaagatactgaaagtcattgaacttaatctgaagcagaggttcgaccagctgaagtaccttattagttacttcaattgttttagggtcaaagcccttaacttgatccacttcgtctttagtaacgaagcgacgttcaattttgctttcatcaacaggatcacttttttttagaccaaatcctacgcccttgcctaggactatttcttcttgaccttggttattttcaattaaggcagcactattattaaatgttttaagaaatttcataataattcaccaccttagcaaaaaaagaaaaagctatcacaaataatgatataccaacgcaacattatttgtaatagctaagacctgatcgtatcagtaatccgctcacttacagttattataatagccaacattgtaagcggtgtcaatataattttgtgaaaaaatgcaaaatattttacaatgaactaaaaagcgaggtaattaaaatgaaattcgttcttgcacctgattcatttaaagaaagcatgacagcaaaagaagtctgcattgcaatgaaaaatggtattcaaaaagttattcccaatgcacaaataaccgcagtaccaatggctgatggcggcgaaggtacaactgattcattggttgacgctacaggcgggcaaaaataccaaataaatgttaccggtccgcttaatcaaaaagtatcagcttattatggcatctcaggtgatggacaaactgcaatcatcgaaatggcacaagctagtggtctctcttatgttgcaaaaagtaaacgaactcccgaaacaattttaaagactacaacttatggaaccggcgaattaattaacgcagctttgaagcaccacgttaaaaagattatcatcggcctgggcggaagcagcacaaatgatggcggtgctggtatggcacaagcacttggtgttaaattttttgatcaaaatcatcatgaaatcacccaaaagctagcaggcggtgctttagatcaaattgtcaatattgatctttcttcaattaatcctcgtattaaagatacccaatttttattagccagtgacgtaaccaatcctctaactggacctaatggtgcaagtagcgtcttcggcccacaaaaaggcgcagatgatacaactgttaaaattctagatcaaaatttatctcactatgcacaagtaattgagcagactattgataaaaacgtcgcccaaatttctggtagtggtgctgctggcggcctaggcgctggcctgatcgcctttactaacgccagtattcatccaggcgtgcaattaattgcccaagaaactaagcttgaagccaagatcaaagacgctgactatgtttttaccggcgaaggcggaactgattttcaaactaagtttggtaaaacaccctttggtgttgctaaaattgctaaaaaatatcacattcctgttatttctttagcaggctatttagatcaaggtattgatcaactctatgatgaaggatttaccgctatatttggcattcttgctaaagcagaagatattgagcaagccctaaaagatggaccaataaatgttacccgtacaactgaaaatattgttcgtttaatcgcacaaaaataagatgagctcgatgcccatcttattttatttcgttaatttcttaattaagccttcacagccacgataaatttcattatacgctgtttcaaaatcatttgtataccaaggatcatcgacatcagcataagagccagcaaactctaaaattttatgttctttatgctctgggtctccaccagtaatgcgattcatatctgcgaaattttcttcatccatgcagattaaatattcataattatcatagtctgagcgagtcatttgactagcacgatgaccacgatcatatggaatatgttttgcaactaattcccgttgtgcacgagcatcaatcccatgacctaaagcatcctgcgtagttgctttagattcagcagtatattgatctgctaggttattttcttttaacaaatattgcatcacggcctctgccattggtgagcggcaaatattgccatgacaaacaaacagaatttttttcattaccttttcttcctcttagttagtctatttataaccggccaaataatcgccgtaataactccaactgttaagccaacccaaatctcctgcgacaaagttacaagaatgccactataaactcgactttgcaatgcggtcatcgcctcatttgaggcaagccacaatgccacaaatgaagcaatagtagctagtgctagtggaattgacgccgaagagcgaccaaataaaatcaaaattgcggctaacaaaaataacaaagccactgcaaaaattgaatactcataaattgtaataatatggttcacatcttctgaatcttccttcaatttatgattaatttgcttgactaaatattcattgataatttcttccaacttacttttactagttaagcctaaatctttagtggtcaattttccctgatcattatatttttcacacaatctatatagatcagcatatgataagttaacttgatatttcggcggcaattgttctaacaatgtcttttccaaaccagatgcttcgagtaactcaacccctgccttcaaattaggattatctgagtcatccactactcgattgattacttctttgcccatcgcctgtgtatcgtttatttttaaattcacattgctagtcattaataaccaaaaagatactgcggctaggccgaccattatcaaacgtagtattattttgacgatgttcttcatctaaaaatcttcccctaacatctacttttttcagatggcaaacaattgcaaggcaccatgtcaggagcatccttttctttcaatttaagttcttgctgcatcgtcttaatatcgcccttagaaagcggtgcttcttttagcaactgaattaatacctcacccttgtgcatatcacacatgttttgcatcatatgtaaagtaacttcagacatcattttgcgctgactaatagtcggcttataaacaaaacaccggccttctttacgcgtctttagcaagcccttttgcactaaacgccgcattagcgttttaattgtggaatcggaccaatcctttttaccttgtagttctttgattacttggccagtacgaacttctcctaaggtccaaataatacgcataacttcccattctgattgggtaatggaattacgatcgtctttagtttctgccataaaacatcacttctaaatccaaattttttactaaagaacaaattttttcaaagcctttgcaatcccgttgtgatcattatcatcagtaacataatcagccttatctttgatctcactaatggcgttacccatcgctactttcatgaagttgggattagaaaacatcgaaagatcattgccttgatcaccaaaaatcatcacgtctttttgggcaatttttagccgtgaagccaaatccattaaagcattaccttttgaagctcccaaggcatttaattcaataatactgtcaaaactgcgaacaatgtcataagtctgaaaagcccagtcggggaaactattccacagtttttctacctggtcagctccttcagttgaagtaaaaccgactttgttaaaagtaaaatcttttggaatttcttttcggtctctaactttcataatattatcggtcaaagccgcattaatttgcatttgcacagataaatcccgatcagttgtaatgaaatacttagtcgtctcaaaatgtacatttacatgacttaaacgctgaaaacgcaacatattattgaagtcttgataattcaattcctgactcattaaaacacgaccagaaattgtttgaattactgcaccattaaagacgattgcatattgatcatcaccttcaattcctaattgcttagcaaagttcaatactcctgataatggtcgtccagtagctaaaacaaccttaatcccattttgtactgcgacacgcaacattctttgcgtttctggcaaaatagtattattgcttgataataaagttccatctaaatcaaccgcgatcaatttaatagccattttaatccctcggatcttaaaaattacatctagcattaattatacaaaaagccgtgatttaactcacgactttttacttatcgattattcaattaggattttacttacccatttccttttcgaccactttaacgatacggtctacataggcatcagtttcttcttgagttggtccttcagccattactctaagcaagtcttgagtacctgatggacgaacaagtacacgaccatttccagccatatccttttccactgcagcaatttcatcaagaattggttggtgttctttccagctcttcttgtcagcaaccggaacattaactaggcattgtgggtaatctttaaagtctttcaaaagttcacttaatgacttaccagtcttcttcattacgagcattaaatgcaaaccggttaacataccatcaccagtattatgataatcactcataataacgtgacctgattgttcgccacctagattgtagccgtgagcacgcatttcttcagaaacgtaacggtcaccaacttgggtacgaacattcttcaagccttctttttcaagagccttagtaaaaccaagattactcattacagtagtaacaatggtatctttcttcaaacgaccatgttctgccaagtatgagccgagtacgtacatgatgtggtcaccatcaacttcattaccattttcatcaacagcaatgcaacggtcagcatccccatcaaaggctaaaccaagttgagcaccttgcttaacaacttcttcttgtaacttttcagtatgcgttgcaccaacatgatcgttaatgttcaaaccatctgggtgagttgcaatagtagtaaagtcaacgccacaatcagcaaacagtcttgagatcaatgcgcttgaagcaccgttagctccatcaataactaccttaattccacccaagtcttctggaatagtattttcaataaattgcaagtatttagctgaaccttcgtggaagtcagttacagtacctaatcccttagcagatggacgaggtaatttatcttccttagcgtcaattaatttttcaatttcgccttccatttcatctgaaagcttcaaaccatcgctaccaaagaacttaatcccattatcttctacagggttgtgtgaagctgaaatttgcacccctgcatcggcgccttgtgctcgtactaagtatgaaagacctggagtagtaattacgccaacctcaagcacttcaatcccaactgaaagaaggcctgaaatcaaggcatattcaagcatttggcctgaaatacgagtatcacgagatactaataccttagcttgttcgccgtcttttttgttcttagttaaaacataaccaccatcacgacctaatttaaaagccatttctggagttaagccttgattagctacgccacgaacaccatcagttccgaaatattttaacatttaataaacaacctttctcaaattaattattcgcattctttactttaattgatatctgtacattttcaggatcaacgcgagcaactcccttaggtaaaactaaagggtaattctttacagttgaatatgagattcctttcagatctacatcaacatccaactgcttaatctttgctaatgtttccttttgtccatacagtgttacctcatcattcttggcagtaaccgaatagactttattatttttttcatttttaggctttaaatttagcttaactttctttttgaaaagcgatattggcaaactagcttttactgtagatggattaatcactgcatttaattgacgcccttttttatcttcagctatcaaaataacttgacgctcataatcatgattaatgccattaggtaaaggcaacttggcaacgatctgatcaatctgatttacttcgcttctagcaccagtaacctcaacttgctgcggatcaacactagccgtaccaatattatatccattagcaacagcatttttattatactctatttgaacgggcatggtacgagattttcgccgttcaatatcaacattaactgttgccgggttaatcgtgtaagataattgactatttagtcccgtaacttctacctttacggtttgcttacctattttcttatgagttagatcaatataagcacggaagctttgagtattaacagtcgaagtaaccaacgcattcgaaccctccaaagttatcttaaccttttcaggataaccaacaacatagtatttatctgtattaaccgaaacttgcagaggaacactaattgtctgcgtttcattagcagtttgccgtgtcttcttagattcaccctgtgtaacaaaacctgtttgagtagagtcaatgtaaaccactaataagatcgcaaacagcaatgagattattctgattacccagcgtttatcccaaaagtctttcatcgatctgcaccccatttccagactttattaatcacacgacgaatccatggaaccttcttctcttccttaggaacaagttgagcattcaaatacttcaaatattcttcacgagacaaatctactaaaaagcgcccgtttctagtaatagttacgccaccagtttcctctgagacgacgatcgttaccgcatcggtaacttcagaaataccaacggcagctctgtgacgcgtgcctaaacgcttaggaatcatgctgttatctgacagtggtaaatatgctgctgcaacagcaattcgattattattgataattaccgcaccatcgtgcaacggcgtattagggataaaaatattaattaataattcaccagaaatatccgcatccagcttgattccagtttcaatataatcatctagccccgtatcttgttgaatcgtgattaaggcaccaattcttcttttagacatgtattgaatcgctttatcgagctcctgcaccatcttaaccgactgtgtatgagcactctcacctcggccattaaaaatcggcgtgcgtcctagccgctctagtccacgacgaatttccggctggaaaataacgataattccgattactgcccaagaaacaatttggtccacaatataagttaccgcatgcagttgcagtaagccggcaataattctaacaataaagataaagacgatcccttttgccagttgtactgctttggtaccacgaatcatcatgatcaaacggtaaactaaataccaaatgattaaaatatctaaagcaatggagaaattattccaagtaaacagattagaaatattaaaatgcattgattgctcctttcttctttaattataaccgccccaatttaccgtgcatacattttaaattctaaaaataggtcattatattcttgggtcttcttaggacctaaatctctaaagacctgtagattcttcaacgtactttgagtaggataaaactgccggtcatctctaacttttttcggcaataatttttgggctgcggtatttggggttgcatatccaacatattccgcattttgcgctgcatttttaggttcaagcataaaattaataaacttaagtgcagcttttttattttgtacagttttaggaataacaaaattatcaaaccacaaatttgatccttgcttaggcacaacataatgcaagtgaggattttgttccatcatttcataagcctcaccagaccaggtaacgccaattgctgcctcattttgcactaggtacatcttcatttcatctgaaataatcgccttaatattgggtcccagactattaagcttagtttgtgccaaatgtagtttaatactagatgtggtattcattgaatatcctaaagaaaccaatgccatccccattgcatccctagctgaatcaactagtaaaatttgcctgcgatactttttactccacaggtcattccaagtcttaattgcccctggcttgacgaatttatcattataaacaattcctagtgtcccccagaaatatggcacagaataatcattattttgatcaaatgacttatgtaaaaaactcttgccaatatatttcaaattaggaatttgcttttgatccaactgatcaagcaaatgagccttgcgcattttagttaccatatactcagaaggaatggtcaaatcatatgccgttccgccttgtttgattttggtatacatcgcttcattggaatcaaaggtctcatagacaacatgataacctgtctgcttttcaaacttttttattaactttggatctagatagtcgccccagttatagataatcaagttttgtttatttttcccggtagacgatttctccaaatgatgggataaaccccaaaggcctgcacaggcaattaaaatagctgcaattgccatcataatctttttcatttaactaggcctcccatcacacgatgatttttctttctgccctttttagtagtaataaaataatagattcctacaagcaacaagacaaaaatgaacattacggtacttaaagcattaatctcaagatcgattccttgtcgtgcccgagaataaatttcaactgaaagagttgaaaaaccattcccagtaacgaaaaaagttacggcaaaatcatctagtgaataggtcaacgccataaataaaccggaaaagatgcctggcataataactggaattaaaacatcactaaaaacctgccatgaattcgcccctaaatcacgtgctgcatcaataagcgacatatccatttcattaagtcgcggcaagaccatcaaaaccacaatcggaatagaaaaggcaatatgacttaacaatacagaaccaaaatttaagccaattcccaatgctgtaaaaaagatcaaaaaactagcaccaataattacatcaggtgacaccatcaagacattgtttaatgctaaggttgttttcttattagattcttttttcatcgcagcaattgcaattgcaccaaatgtcccaataattgttgctattaaactggacaacagcgctagtaggatagtttccaaaaatatcgctaataagcgattatcttgaaataaagtctgataatgagcccatgtaaagtgctcaaatttattcatgtttttaccactagaaaatgaaaagtaaatcaaataaaaaatgggtacatataataggatcaaagtaaaagcaagatagatcttagcgattaaatgtctgtttctcataaatctaccttctttcttctagcctttttgctagtaatcaacatgactaccaccatcagcgcgattaaaattactccaattgtggcccccatattccagttcattgtggtcataaaatactcttcgatagcagtccctaatgtgattacccgattgccgccgatcagccttgttaacataaataatgacaatgatgggataaagatggcctgaacgccgctttcaactcctggacgagaaagcggccataaaacatagcgaaaagtttgccatttactagcacccaaatcctcagaggcatgaatgactgcaggattaatctctttaatcgcattaaaaattggcaaaatcataaacggaatttcaatgtaagtcgccacaaaaataaaagcaaaatcagtaaacaaaatatttacgggaccaataccaaataaatgtaaaaatttatttactaaaccgtcattacctaaaatgccaataaatgcatatgctttaagcagcaaattaatccatgttggcaaaatgatcaataacagccacagctgctggtttttcattttaattaaaaaatacgctgccggatacgaaattaccaacgtcaacaaggtgatcaaaaatgcataccaaaatgagttaagcatcatttttaaaaaggtaccatttttaaaaaattcaacgtaatttctgagcgtgaatgcgttattactatcagtaaacgaataccagagaatcaataaaatcggcaaaatgacaaagagaataatccacagcagatatggaatcataaaaaacatctttttatttttcattttcatccgcctcatacttttctagtcgagcatcaaaatcgtgttggctttcatttaaccgcatgacgtgaatatcttctggatcaaaaaagagcccaacacgttgtcccaatttaactccattagtagaatggatcagccattcattttcattggcatcaattgccttaatctcaaagtgatcacctaaaaataattgcgtctgtgctgtaaccacaatcttcccatcttctggtttaacaatatccaagtcttcgggacgaataactacttcaaccttttcattaggcttcatcccaccatcggcacatttaaatttattattagcaaattccacttcgtaatcatgaatcattcgaccagataaaatattggagtcaccaataaaacgtgctacaaagtcattcactggctcatcgtaaattgctaccggattaccactttgttgaatctgcccatcatttaaaacaaaaatttcatcactcattgatagagcttcttcttgatcgtgcgtaacaaaaataaaggtaatgcctagctttttctgaattgcccgtaattcaaattgcatgtcttttcgtaaacgtttatccaaagcagatagcgactcatctaatagtaaaaccttaggttcattaacaattgcccgggcaatagctacacgctgctgctgtcctccactaagttccgaaatttcgcggttagcgtaaccgtctagacgaaccatatgcaaagcatctttaacagctggcttgatttcactcattggtcttttcttaattttcaagccaaacgccacattttgaaaaacatccaggtgtggaaacaaagcataattttgaaaaactgtattgatatgtctttttgaagcatcaaggtcagtaatatcattaccatcaaagaggacttgaccactagatggctgagtaaagccagcaataattcgcaaaattgtcgattttcccgagccactaggaccaagtagtgaataaaatttaccagattcaatagttaaatttatatcttttaatgctacaaacccatcatcatattttttggtgatgtgttttagtttgataatatccatttccatccctcacataaaaaacagctgcaagccttccagcctgtagcttgtctttgctaaaatattttacttttctttgccgataatcctaacttctgtgcgtaagtcaatgtcaaacttttctttaattaccttttggatcaaatgaattaaattcaaataatctgttgcagtagcaccgcctttattcacgataaaacctgcatgtttcattgaatcttgagcgccaccgatttgtttaccttgtaaaccagctttaataatcatcggaccaacaaagtgcccagtaggccgcttaaagacactgccacaagatggatattcaagtggctgcttataacgacgtaaagcatttaaataatgcatatgatctaagatctctaacttatcgcctgacttgagtgcaaaagtggcgcttaatacaatatcgccattttcttgaactaatgaatgccggtaagaaaagttcatttctgcgtttgaatatgttttaaattctcctgctctggttaaaacattaacgctttgcactacttcttgcatctcaccgccataggcaccagcattcataaaaataccaccgccaatactaccaggaattccagcagcaaattccattccgctcaaaccatgatgagcagccgcaaaagctgtatcgataatccgtgcaccagcatcagctgtaacttgattatcttctactttaatctcttttaattcagtcaaaataattactaacccatcaattccgccgtcacggatgattaaatttgaggcattgccaataattgttaatggaatttcattttcacgtgtgacttttactaattgttctacttcatcagtcgtcttaggaaaggccaaatattcagctggtccacctgtcttagtaaaagtatatctgcttaatgggatttgctctttaatatcaatccctttttctttcaaatcaagtaattccacgctgttgcctccttaaagtttcttgttttattttaccgcataaaggcgttagcttcattaatattaatgatatacttttttaaaaggagaattttatgaattttattgcaatggactttgaaacagccaaccattatccagaaagtgcctgttcacttgctttggtaatggtgagaaataataaaattgttgatcgcttttatacagtaattaatcctcaaatgccatttgacgcgcgaaatattcaagtacatcaaattacagctgaggacgttaaaaacgctccaacaatggcagaggtctggccccacattaaagaattgtatcaaccaggaatgcttgtagccgcacataacgctcgctttgatactaatgtcatgcggcaaagcctggcacgttacggtattgaggagccccactatttggtcattgacactttagctagcagtaaattactcgaaccagaactgcctgaccacaaattagacacagtttctgaggccttaaacgttgaattgtggcaccaccataacgcattaagtgatagtgaagcatgtgctgggattttaatcaagcaagaagagcaatttggtgatgaagcaatcaaaaatttggtttatcagatatgaaaaatctctaggaattttgatcctagagatttttgctttacttattaaattcagttaacgcagctttgacccattcttcattgcgcttaccatgaggagtaaattcaacaacccgtttagttgaatcccaactatcgtccactctggtaatcgtaagttgcaaatactcatctggcaaatcattcattactagttgtggccattcaattaccactaaacctggttctgctaaatagccctccaaatcaatcgaggataaatcatcattttccaaacgataaaagtccatatgaaagagcggcaacttagcttctcgatattcacgcacaatggtgaatgtaggactcttaacaggccgatgtatgcctaatgctcgccctaatccttgagtcatggttgtcttgcctgcacccaaatcaccatttaatagtaataaatcgtagggctgggccgttttggctagggatgcacctaatttctgcattccatcagcagaattaatttctaactttgtcattacttttcatcctttgctaaagcttgtgcggcagtaacaattgctaaatcataaatatcttgttcactgcagcctcgagataggtcattcactggagctgctaaaccttgcaaaattggaccaacagcagtgaagccacctaatctttgaaccatcttataaccgatattgcctgattgtaattctgggaaaacaaagacattcgcatgtccagctacctttgagtttggagccttcttttcactaactgcaggtacaaaagcggcatcaaattgcaattcaccatcagctggaatttctggatgatccttttggaacatagctgctgcatcatgtaccttatcaaccattggtccttcggctgaacccttagttgaaaagctcaaaaatgcgaccttaggatcaatttcggccatcttggcagtcagagcagattgatagccaatttcagctaaagtttcttcatcaggattaatgttgatggcacagtcggcaaaaatgtaacgctcatcgcccttttccattacgaaagcgccggatactcgatgcatccccttagctgcatgaattaattgtaaagctggcaaaacagtgttagccgttgagtgagcagcaccggaaaccataccgtctgcttttcccatcttcaccaacatggtaccaaagtaattaccttgggctaacttgagctttgcttcagcaatactggtatcttttcgtctagctttaacaaattccgctgccatttgatcaagttcatcataatgattgaggtcatagatcttaacaccagctaagtctaaattattttctttaactaacttagcaatctcatctggatttccaattaaaattggttcgataatgccatcttttttcaaattagctatggcagtaagaattcttaaatcatcgccttctggaaaaacaattcttttcttatcttttgctgcttcaacttgttttttgaataatgaaaatacgctcattttttacctcttatgctaaatcagatttacttatcgtttctggcaattgccagtcaatcggcgtttcatcaaagttcttcaatgccatattacaccgcgaaaacggtcgcgagccaaagaaccctcgatcagccgaaaatggacttggatgtgatgatttaatgataaaattcttactttgatcaattaatggaatcttgttttgagcaaatcgaccccacaaaataaagacgacttttccacgctcactcagagccttaattgcagtatcagtcacatcttcccaacctttgccttggtgaccgttagcatgcccatacggtaccgtcaaaaccgcattcagcaaaagcacaccttgatcggcccacttttttaagtaaccgtgattaacaggccgagctccgacatcatcatagagttccttatagatatttttaagtgatggcggcaaagttgtacctggcatgacggaaaaactcattccattagcttgaccaggattatgatatggatcttgacccaaaattaccactttagttttagcaaacggtgttaatttaaaagccgtaaaaatatgatacatatcaggataaatttgtttagtagaatattcttcttttaaaaaattatgcaattcgtgatatttctcacttgcaaaaacaggatccaatacttgatcccaatcgttgccaattaattctttagccaagtcttacaccctcttttcttctcctctttatggtatcattaatttaatactaaatgggagagaaattatgatcaaattagttgcttgtgatcttgacggcacgttgtttaattcagagatggctgtttctgctgctaatgcaaaagctgtgaaaaatgcacaaagtagcggcattgaatttttaattgcgactggccgggccccacgcgaatcacgttcagttctcaaagatgctgatttgcataccagttttatcaatcttaatggtgccctggtttttgacgaaaatgagcaattaatgatcaaacacagtattcccaaggcaaaagcacaacagctagtgcatttactacatcgatcaggcttttactttgaaattttaactgccaatcaggtttatagtgaaaatctagatcaacgtatttcaaatgtagctcatttaatggtagatctaaatcctctacttgattttcgtcaagctgtagcaatttctgctggtaataagactattatgaatatgaaacaaatccacagtttcgataatttattgcaagatcctaaaatagaagtaatgaaaattattgcttttgactctcggggacatgaagcttttaccgatatcaaaaaagaaatcgctacaatgggcgatctagtagtaacttcaagttcatcttctaatattgaaatcaatgagcaacatgctcaaaaaggtcttgccttacttgattatgccaagttaaaaggtatcgagcctgaggaaatcgctgcaatcggtgataatttaaatgatgagagtatgatccgagcagcaggtactggcgttgcgatgggtaatgcgattccagctattaagaaaatagctcaggtagtcaccaagcgaaacaatgaagatggagtagcttatattttaaataaatttattgcagataataacaatatttaaagttatgaggtgagtaagtatgcgattttggctagaacttaatcaggaaaaggattacggtcaaattcctgtgcttaatcaaaatggaaaagctgaattttttattcaaggcaatcttgataatccaaaccacactttatatctaaataatttccgtaaacaggaagtgggacgtctgttttctgatggtgcgggcctaattgcttcgttcacaattgatgtcgtcaaccactctttagtaggcgtaaaaaagttaaacacacctactgcaaacatattctatttgacccaattaaagtatattgttacaggtagtattaaacgtggtacttatacttttcgttctggaatcaagagtgtagcaagtgtccaaacaatcatgggagatcgcggaggcgttttaatttgtgatattactaagcctgaagacgtcccctttattcttttgacatccgttctatttacacaatggcatgttacgcctttgaaactgcctagttttccgccaattggatttgaggtaaatccaaattaaacaaaaaagcagtcatgaaaattttcataactgctcttctagaaagtgatatagatatagatgtatcttctgccataaagtttatatttattaagtaataaggaattattaggcagagactgaataatgaaagttaaatctaatttgattcaacctccatagcttattatacttcgttcagccaaaaatacaagggctagatgttattattttactttaaagatagctaaataatgcatttagagctagcttatagcttaataatttgttatttaacttagtacatctatttttctaaacaagacaactttaatttctacgtaaattgcaataataaattgaacacttttaatcaagctgcttgatagattagatctaattctctttcaaagatttcatctggtgtatgatatgccaatatctttcttggtaaagagttgcaccaggtttcaatgtctatgatgtcttgtagtgaataattgtctattgcctctcccttaggaataaatctgcgaatgagtccattatgtctttcaacggttcccttgtcacaagatgtataaggatgagcatagtaaactaaagtatttgatacgtcttctaagcttgaaagatctgcaaactctgagccattatcagtggtaatggttttaaaaatatcattccaatgttcgctgtattgcctttggagttctttaaaggcctgcatgacactgacagaagtcttgtcaggaatacgaagaattaagaactcacgactcatacgttcagataaggttagcagcacctcatcatctttgctcttatgtccgagaactaaatcgcattcccaatggccaaactcattacgtttattgatttctttaggacgttcttcaatgcttctgccaagttttttcttatttctgcgaatacgatgaagcttggtattgcgtttaagcttctctggcaagtcgtaattatgtatatctaatagaccttggtcgacataattgtaaagagtcttagtacagacaacatctctgctgctaaatgcgccaacagcggtggcgcgattactgcacacatcaagcgaccagccgtctttaaagaaatgtttgtggacatagcgcatgaattgagttttcctgagaaagtctgatttacgtccacaatttttacgatgagcttgatatgcatcatgcccttgagtagccttatatcttttgactttgccatgatacagttctacagtaccgcgcttaacctcataactgatagtagaaggggaacagtttaattcacgggcaatggcacgcaaagaatagccatctttcaaacgcaattgaataataactctttcctcgaatgataaatgcttgcctttaatgtgatgattcatggtagaatgtaaagagtccattttgacctcgtttctaaatgttgtgtggtaactacattctatcaaacaggtccgaatggactttttattttttattaagtgttcaatttaattttacaatcagcgactttaatttctattaaaaaatatagtgaaatgatcaagtgatttatcaatggcttgatcatttttatttactttatcaacgaacttgtttttagctatcaaactatataaaaaagagccaaatctaatgatttgaccctaaaaattctagattattaatctaaattattttttatgaattagtcttggtagtttaccaattctaagaatgattctggtactaatgaagcaccaccaaccaagccaccgtcaatatcaggcttagccattaattccttaacgttagctggttttacagaaccaccgtattgaatacgaacgttttctgcagtttcttcgttgtacaagtccttaacagtttcacgaatagtcttgcacatttcttcagcttgatctgatgaagcagtcttaccagtaccgatagcccagattggttcgtaggcaataacaagtgaagatacttgttcagcagttaagccgtctaaagcagccttaatttgagcaactacccagtcttcttgcttgttagcttcacgagtttcaagtgattcaccacagcaaatgattggcttcaagccattagcaaagattgccttagccttcttgttaatgtcttcgtcagtttcgtggaagtaaccacgacgttctgagtgaccaataattacgtagtccatacccatttctttcaagaccttaggtgaagtttcaccagtgtaagcaccttcgtcttcaaagtaacagttttctgcaccgatatgtaagtttgagccttcagcagcttttctcaaagcgtcaaggtcaactgcaggtgcacaaataagtgattcaaccttacttgggtctggtaacttatccttaacagcgttaacgaattcagtagtttgttctggattcatatgtaacttccagttaccagcaataattggtgtacgactcattaatctattgtcctttccttactattacttgtctgaaacgcaagcgatacctggcaattccttaccttcaaggtagttaagtgaagcaccaccaccggtagaaatgtgggtaatcttaggagcaatgcctaattgcttagcagcagcagttgagtcaccaccaccgatgatagtagttgcatccttaaggtctgccaatgcacgaccaacttccaaagtaccttcagcgaagttaggcatttcgaatgcacccattgggccgttccaaacaacagtcttagcatccttcaagatttccttgaacttttcaacagtcttaggaccgatgtcaagacccatcatgttgtcaggaatatcatcaccaacaacttcacgtgaagcatcatttgagaattcagttgcggctacgttatctacaggaagaacgatcttgtcgccagccttagcaagtaattccttagcaaggtctaccttgtcagcttcaaataatgatttaccaatgctgtggccttgagctgctaagaatgtgtaagccataccaccaccgattaaaatatggtctgacttaggaattaagttttcgataacaccaatcttgtctgaaaccttagcaccaccaagaatagttacgaatgggtgtactgggttttcaacagcatcacctaagaacttgatttccttttcaagcaagtaaccagctgctgcaggcttgccagcttccttcatagcagttgcgataccaacgtttgaagcgtgacttctgtgagcagtaccaaatgcatcatttacaaacatgtcgccaagacttgcccagtattcgccaagcttaggatcgttacctgattcacgcttaccaaagtcgttgtcgatgtcttggaatctagtgttttcaagaacgataacatctccatccttcatgttgttgatagcgtcttcaacttctttaccttcgtttgatggtacaaaagttacaggcttcttaagaagttcacttaaacgttcagcaactggctttaatgataattccttcttgtcagcatctgacttaacacgacctaagtggctaagtaagatagccttgccaccgtgttcaatgatgtacttaatagttggaagtgcagcaacgatacggttgtcgtcaccaataacgccatccttaattggaacgttaaagtctacacgtactaagacctttttgcctttaacatcaagatcgtcaacgattaatttagccattataatcctccgattattttgatattttttcttcaaaaaaaggcggaaggaagaatctccctccgccttctcaattaccacttaactatataatcagttaattaaaattaatgattaaagagttgcaaagtgtaataaagtacgtaccatttggcaagtgaatgagtattcgttgtcgtaccaagcaacagtcttaactaattgcttgtcacctgcagtggttaccatagtttgagttgggtcaaagattgaaccagcagtcatgttaagaacatcgctagaaacaatgtggtcaccgttgtaagcaaatgatgggctttcgtacttcttcatagcttcgttaacttcgtcagcagtaaccttcttgctcaagattgataccaattcagtttctgaaccatctggaactggaacacgttgtgcgtgaccgttcatcttaccgttcaagttaggcaataccaagccgatagccttagctgaaccagtagtatgaggaatgatgttttcagcagcagcacgagcgtcttgttccttaccactacgtgaaggaccatccaaagtcatttgagtaccagtgtatgcgtggatagtagtcatagtagcaacttcgataccgaattccttgtccaaagcgttagccattggtgcaagtgagttagtagtacatgaagcagctgaaacaatcttgtcatcagcagtcaaagtgtcttcgtttactgagtaaacgatagtcttcaagtcgttaccagctggagctgagatcaatacacgcttagcacctgcatcgatgtgagcttgtgacttagccttgctagtgtagaaaccagtacattcaagaacgaagtcaacaccatcgttcttaacccatggaatgttttgtgcttgtggttctgcgtatacgtggtaactcttaccgtcaactacgattgaatcttcagttgatgaaacttcgtggttgaaagtaccatgagtagtgtcgtacttaagcaagtaagcaagcattgctggagtagtcaagtcgttgatagcaacaacttcaatgtcctttgacttttcgccaaggtccataatacgacggaatgctaaacgaccgatacggccgaaaccgttaataccaattttaactgtcataacctaaagtcctccttaagaactataaacaacatttattttaaacgggatttcatttcccctttaaaatcatatttgaggcgccctcatcagtgattagccaggtttgatgaggcgcattaggcatataagctttaattgcttgagcctttcgggcaccacaagcaaaagcaaatatgtggggtattttgtataggttctcgaactgcaatccaacctgggtgatgcggtcaacaaccttgccatgttcatcgaagaaacacccgaaacattcggtgacggctctcttctcacgaagttcagatagcttaattgaattatagcctctgcgctgtgccatttcttgagctaacccaataccatgaatcacagcatcactttgagaaatgtcttgcagaacatctgcgatcgaggactcacgaatcaaagatttgtaagcatcatctgaaacctgctcaggtaaatataatgtcttataagtacctgaagtcttagcagccatttcttggacgattgtattactttgcgtctctacattttcgcccaaagctcctcgacctggaacaaattccaactggcgattgttagctaaatctggtgataaatacttagcagatctagctaacgccgctccacctagaattgtaactattgaatggcctaaaggcaagagtaaattcaaagctgaacttaatttttctcccatctcctcatatactcggtcttggaaatccgcattaccagggacgatcaatgttctttcaatccctaattttttggctaatgctacttccgtttcaccggcattaaagaggcgatcaagcaatggtcctgcatcttttaatgttttctcacccttttcagttaaaaacatcccaaaactttttgtttcaatcaatcctaattgacataagtactcagtctcagttctgatgtttctctctgaaagccctaaatgctgagcaacactccgacgtccaattggcgcatgtagcgaaatctgctcaaggacaagatacctttgtcgaagaatctttaagacgtcgggaacgagcgcttcgagcaaagaaaagtccgaatccatcgttccctcctttccatgggacatctatcgaccacctacgtgtcgttttgtgtcccagaatgcttaaaaatataagagaaacgtacttttcattcaattcatacatttcccaatcgacactgttagtataacaatgtatttttcgtaattcaagaaaaagatacacgattttaaaaaagtcgtaaatcgagtaaaatcatttttatttcattactttttttgatatactaccacttgtgaatcatctgggcccttagtgtaatggatcgcacataagattccggttcttagaatctgggttcgactcccagggggcccatataactacatgttgaagactaccgccatctcggtattcttctttttttataccaaaaaagcattcctcacggaatgcctttttcaatatcacaattatttagtgcttgtagtcatcaactcagcacgttgtgctaactcagtgtacaaagttgagcctgaaacagataaaccttcaatttcacggcgagtgttgaaatgatggctacccttataagtaccatttgctgctacacggaagatgtagtcgttaaaaccaatatagaattgattgtggttgctgtcataagcaaaaccttgaactggtgaaccagttacgaaattactttgagtagcaccgatttcttctggagcccaagtgtcaccatttctagttaacttccagtattcatattggtgacgaccaccattgtggaacaatgcatacatagtgttgtcgccaacaaaggttgcattatggaagtaacgaggatatgcactgctgccgttccaggtcttaacagtccagattttgttaatcttcatatcactctttcttacttgcataatttcttctgaagctgttgaattagcagtcttattgttattagccaaaacataaatgtagcttgaagaagagccaagtgattgaccatgacctagcttaatgtatggtgaaactttaatattgtttgcgtagcttctaaaagtgctccatcccatagtagttaagttttgagcagcatatttactcttaattgcattcaagttgtaagaaacaagatgtcctcttgagtcgctactgctagtgtacatagaagctgtaaaaataccatcattaacagtaataccttcaggaattaccccaacttgtcccattgcatcagcagcttgaccatagcctaagctgacaaaacgtggttggaacaaacgagtgcgcaaagtcatgccgttacctgaatagctatttgagctagtttctgaacgataaccgtgtgcctgattccaatttcttgatgatccctttgagccaccattccaagtatgaactgccttaggaccactcttaacagaagcacctgcactagtaattccttcatttgtatctgaacgaacagttacattaacgcttgcctttgccttaccatatgaataatctaccttagtagtgccggcacggcttgaactaacagagctatgtgaaacattaaccctatctggattaattgcagtaccttgtccatctgttgcatagttaattgcatccctagttggaaaactgtagttgctgttgtgaactaagctaacatcttgagctactgaaatttggtttctagcaaaaaagttttgacttacccaacctacattgcgtccatcgacaataatgtaccagaagttacctttcttggtagaaacatacttcttagattgaatttgaccatgcttaaagtacttggtatttgaaaatgcacctgatggtccttttttagatacattatgataaatagcgtaattaccattgccagcaatcttagtaactgccttgctgtagcttttggcatctaccttgctttgactaatggcaaaaacaccaccaactaatgcagcactggccacaaaagttaataacatctttttcccttttaacatccttattaatcctcccatatgaaaaaatcacgttcattttagcacaaatttatcaaatgaaacatctaattattaaaaaatttcctgaacaacaagactttgaaaacgcttctgttatataattaaaaagttcacataaatatataaatagtaatagggagaaattttatggtcgaatcacaaaataattccaaaaagatgatgtggaccaccctagcaatgatggccttctctaccgtgtggggctttggtaacgttgttaatgggtacgtctactttgacgggacaaaggttgtctttagctggatcgtcatgttccttctctactttgttccttatgccttaatggttggtgaacttggagctaccttcaagaatgctgaaggtggggtttcctcttgggtaaatgccactatgggcgcaaaatgggcctactacgcaggttggacctactgggcttgccacgttgtttatatttccagtaaaggtactggtggtttaagagcgatggcctggggtatcttcggaaatacaaaatggtatgatggcttacctaccgcttggacacaatttgctacattagtagtcttcttgcttttctgttgggttgcaagtcgtggtattccagtattgaaaggcctagcaacaattgctggttcttcaatgtttatcatgtcaatcttattcatcattatgatgtttgccgcaccagctattaatccttctgctggtttccacagtattgactttaactggaagaatttgatgccaaccttcaacgtaaaatactttacttctctttcaatcctagtatttgccgttggtggttgtgaaaagatctccccttatgttaataaggttaaggatccttccaaaaacttccctaaggctatgatggctttagcaatcatggttatggtatctgctattttaggtacttttgccatggcattaatgtttgaccctaaggtggttaatgccaaccttaacgaatacatctctaatggtgcctacatggcatttgacaagctgggcgaatattaccatgttggcggcttgttcatgtacatctattcatggtgtaacgtaatcggtcaattctcaacattagtaatcagtatcgatgcaccacttagaatgcttttgggtagtaaagaagctaaagaatttattccaaagggcttattaaaactcaacaagcatggtgcttacatcaacggtatctggatggttgttgtcctctctggtggcttaattgctattcaagctttagtaccaaatgctcaagctgttatggcacaattagttaaattaaattcaactactatgccacttcgttacctttgggtatttgcggcatatgttgctttaagaaaacagcagcaaaagttcaacactacttatcaaatgactaaacatcaaggcttagcctatactgccggtatttggtgttttgtagttactgctgcatgttgtatcttgggtatttactcaccagatccatttaccttattccttaatatcttgacgccaatcgtcttgattgcattaggtttaattttgccaggaattaagaaatatcaagaagcaaaggcaaaataaaatttaaatacagaattttaaaaaggaagcaatttcaaaagactgcttcctttttagtgtatatttttatttattagcccaagcatttaccaatgccttgtacttggcaacgctaattcctgcacctttactgcttcctaaatatgaatcagcatttccataaccagtattgcttacattggcaaatcccattactctataatttctgttaatcaaattcaagtagtgtcctgccattttatagccgttcgtgccctctacggccgcatcataagttgccgtccaagttggactatacttcgccggcttcaacgaatgattcttttttacatcataattccaacttttcttttcagagaaccaagtatcaaccggatctaaacccacactttgagtagcgatgttttccaaaccaatcgacttgaaataatgagtatgctttaagccaccacgtttttgatagtcagcatttaacattgaggctgctgtcaaaagtggtgacacctttaatgaccgaaccccttcacttctacgtgctctattgacactattcaaataaggcaatacagctttaatattcttagcactagttgcatcatcatttgaatgcaagtcaacgtattcattgtaccaacttgccttaggctttttacctaagcgacctgttttcaataatttcactgctgatctagcagagcttctttgccctttagtcaaagatttgtttttagatagatatgtcataaaatcaacggcatttttggctgccttaactggcttggaactcaataccgttaaagataaggtcatcatcacagctgatgcacctgcaattaaaaatcgttttttcattctttttctcccatattaatatatgtgaactacgatttaattgtagcacatacactaatggaagattttccttttaaattgcattatccatccatcttaacgtattgtcctttttcatctacaacacctttgaaatggtgcatgctgccatcttcggcctgaaattcacctaagtcaatttccccatagccctttgtagaatcagtaaccttaacatcatcaaaagtttctctgaaaaattgatgaacaattctactcttcaaccgtatatcctttgaatgctcaaaggctgcagacaacgtaaagccctcatctaattgttccttgataaaaacaattagatacaaggtcgctaaattatagcggcgcacaccactttgatcatctgaaatcggcttaatgtagcccttagtttcccaatagcgcaattgcctttgcgaaacaccggtcaatttactaacttcaccgattccaatttctaaattttgaaaaatgtcatgcataatttttttagatttcatcctgataccaccttacagtatagttatattttatatattgttgttatcttttgcaacacttgtgttaatttatctaacttatttgtaagattatttgacaatggaaaattttaagcctatagtttttatagttaacttttataagagaaaggaatattacatgaacaagcaaccaacggatattcatggaaaagcttataatcgaaacctactagttttagttttaattataggttctttctgtactgtattaaacggaacactgctttcaacagcgcttccttcaattatgcgttcatttaacatcagcaccgcaactgctgaatggctttcaacagcctttctgttagttaatggtgttatgatcccaatttctgcatggctaatcaatcgcttcggttcaagaaaaatgtatttgtcagccatgtcaatcttctttattggaacagtgatcgccgcaattgcacccaattttggcaccctgcttgctggaagaatcattcagggattaggcgtcggcgttactatgccacttttacaaacaatcatgctttccatcttcccagctaataaacgtggtgcagcaatgggaactgtcgggattgttattggcttagcaccggcaattggaccaacattatctggttggattgttgataacctttcttggcgttatcttttcagcatcattgccccaattgcgggaatagtaattatcttagctttctttttaattaaagatgttttaccaactaagaaagaaaaaattgatgtttggtcagtaacaacctctactctaggcttcggaagtctgttgtatggtttttcagaagctggtaacaaaggctggaccaatcccgagattttaggatttattggatttggaattatatttgtaatcctattcggtatccgccaattgaaaatggatgacccatttttggacattaccgtttttaaacactttgaattttcactggcagctgccttaagtggtatcaccaacttagcgatggtcggcattgaaatggttttaccattatatattcaaaatttgcgtggcgtttctgccttccattcaggtttaatgttactacctggtgcattgatgattggtattatgtcgccaattactggccgtttattcgacaaatatggtgcacgtaaaatggcaattactggtatgactttgttgaccattgggactattccattcgtctttttaactgaacaaagttcatacacgatgattatcattctttacgcaatcagaatggtcggtgtagctttggtaatgatgaatgttactacatctggtatgaattctttaccattaaacaagatttctcacggtactgctgttaacaacactttcagacaggtattaagttcaattggtactgcaattttggtatctgttttaactacaactaccaataataatatgcctggtaaaagtttacttcatgcactgccacttgaatacaagactagagcaatcagtgcaactttagacggttttcatgcttcatttgcaatgagtatcctcttctcattaatcgcattagttctttcattcttcttaaagaagggcaatcgagcacgtgaacatcaagaaaaggtggatggttaaatgatacttttaattctaatcgtagctgcaattatgtttatttactttaatatcatccctggaaaaaggcatacttctattgcatggctatcattaatcgtaacaattctttgtgttgttggcattgtagaacatgattataatcactggggaatgaaaactgaaacaacttcaagcactaatactctagtttccagtgctactcctcgcctgccaattttgctttatcagcctttaggtaatggaactgaaaaagtttacctttataaaactggtcagcttcaaaagaagccaaaatctattaaattacgcgtggtgctagttaaatcgttttagttaataaaaaagtccaatcttgttagactcgacttgtaaatagtaataatagaaaagagtctgatctgattgaactgccttaagcttaagcgttttagccaccatttacaagttagttttaaagatttagtgataatttgtcggcactggtatcgtttgtatgcaccggctgagtttactcatcggcgaaatattgatcaaattaaaactacggacagtctgattttggctttacttatctggcaagctaagacaggaattgaatcacaaagaagattctgtgaatgtttcaattgtttatcacactcacgttttaatcggcgttcacgtcagctattgcaattgatttatcagatacggcaagaaatgaataaaaaggttgacctgaatggacagttcttgatcattgacagctttccggtacctgtttgccaaccaattcgaaactatcgtgctaaaatttttcgcggttatgccaacattggttataaggccaccaagaaaatttacttctatggtttcaaagttcatgccattgttagcgatgacggttacattcttgattatgtcgtaacaaaggcatcagttcatgatgccagggagacagttgaactgatagaaaatacccatccatctaattactatcttcttggcgacgaaggctatttaggcaaagaactgcatcaacagctaaaacaaatgggttacgaactttggacaccatatcgtaaaaatatgacaggagctaaaaagcacaatgatcatcaattgatggctattcgcagaacaattgaaagcgacttttcgcttctgacctattacaatgccgagaacaatcgagcacgtagtctgataggctttcaaagccggttggaaattgcaattttagcttataatttggcttattgtctagaacgatttaactagcaccacgcgtattaaattagataaagtatcgacaaaagtaaaacgaagcagccaaccaaaagtaacgattaagactactcgctacacctatagcaatacctttaatcaaataatgtttggcgtctttggtcatgacaaggagttaaaacacagagaatatattttttctattccctccaactggaaagtaatgtcagttaacgatgccaagcagttgcaaaaacaaatgatgaaaaaacagcagtttttaaaacaaaaatcagcccaataaaataatgaagctcaaactttgatcatgatatgaaccccgaaattcggacatgaatttcggggtttttatttatggctaaattatctaaacatgacaaaattgatatttacaatagctagaaaaattaaattcattttaactcaaattttaccatatgatttaagttaacttaaatcacctttacaaacgcttatgaaatataatttaactaaatctaaatgtagaaaattatttttatcatactgcctatttcaattgcatcctatcattaaagtaatttttataagccaaatagccactaatcacggctccaaggccagtggcagaaagtaacataaatgtaatcataatctgatacttaattgcataaatgggatttacaccagcaaaaattaagccggacatcattcctggcaaatttactaatcctacagttttagccgaatctatcgtaggctgcatcgcagtcttaatgctccttcttaaaattggcatcgatgcagttttaatatcactacccaaagccaacttttctaaaacttgttgatgcagatcattaaagctatcattcaacgctttatagcataagccaactgccaccatttcatttccagcaatcatccccgtaatgggaatgacctgcatagggactggtttaattacgccagaaaaaatcagaattcctaatgtcacgtaagtccctaccgcttcggctattatcgaattccaaatattccgccccggattaggatcacgctgattagcattccaagatgcattaaaaattatcacaatagttgaaaccaaagttagccacaaggcattaacatgaaaaataaacttcaaaacgtagccgattacgactaactgaattatcgccctaatcacgctaattaaaatatccttggttagtcctaatttttctttcgcagaaattccaatggaaactaacaccagtgcaaaagctaatactaacgaccagttgctaactacaacatttttcattcgattattccgcctttttttactcttaaaatattacttgcttcatcaatttcactttgatcatgtgtaacttgaataattgtcacgcctttctcagaaacatccttaatcaaattatgtacaatatctttactttgattatcaagcccggtagttacttcatctaagagcaatatctttggtaaaaatattatgtttcgaattaacgcaactctttgcttttcaccacctgataaagcagtaatctttttatctaaaaaatcagcagagagatcaacttgattaagtaaatcagctatttgcttgtcatttacatttacttttctaatttcatacgggaaaatcaaattatctcttactgtttgcccaaataaagacggctgctgaaaacaatatgaaacttctctacgatattgaactggatttaaggagctaatgtttttttcttgatatagaatatcgcctgaattagcactaattaaatttgcaatcaatcgtaaaatcgtactttttcctgcacctgatgggccaattaaggttagaaaatcgcctttattaaccttaaatgatacatcttgcaatatttgttttttatctgcactatattggatatgttttaattctaatattttcattcttttgcctaactaaataactcatttttctaattatacaactaaaaaaataaaggaaatccaatattttcattgaatttcctttatttaaattaatatcgataatgattacttagtcaacttttgtttactttcaagtaattcagcacgttgagctaagttcatgtataacttgttgttgtaggttgcgataccttcaatttcacgaccagtgtggtattggtaagtatccttaacttcaccatcagttgcaatcttagcaattacgtcattgaatgcaaggtagaagttattgttcttggcatcataagtaaacccttgagtgtatgtgtttgctacaatgccacccttagttgcacctaccatagttggataccagttatcgcctttgcggttgaattcccagtattcagtttggtctttttctttattataaagagttgtgtaaagcttgtgatcatttacaacaacaccattattgaagtaacgaccgtctgaatcactaccgttccagcatttaatagtccaaatcttgttaatgcacatatcgctcttccgaatttggattaactcttcagacatattgctcttgtatgaaaccttattattgttatttagaacgtaaatgtatttatcagttgagcccattgcttgaccgtgaccaattggaatatatggactaactttaatgttcttaacgtaagaattgaacttcttttggctcatatcaagtaagtattgtccgttaaatgcattggttaaatggttaagattatatcctacaatatgaccattgctaatcagggtactacttaataaactagtgtacaaccagccatttgacatggtaattccttcaggaatatgacctacacggttaatatagtcatcatttttaatgtcacggtaaacacttaataaaactggttggaagaagcgagtagtgaaatctaattttccgctttcactatcataagcatgcttattcttatcaggagtaaaatcagtcttagttacatagttagcagaactgccgtagtaagtcttccaggatttcaaatcgccgttaaatggcttagcttggacgctatcagcatcagcaattccttccttagtactctttctgacagttaccttaacagttgcctttgctttaccatagctatatttaacattataggtacctggagttgagcaatcgattgcatcttctgaaatcttaatatctgctgtatcaattacagtacccatataattggttacataacttactgcatcagttggatcaaaatcgtagtgactattttgtactaaactgatagtctttggtacagcgatagcatctcttgtaaagtagttttggttaacataaccaactttacgaccatttacataaatacgccaataagttgcatcctttgtcttaattctctggtcagattgaatatgagcatattgataatcgctagcatcagcaatcttaccactaggtttaccattactaatctttttataaacaggataattcttattgctacctactttaaccattaagtcataagaagtacttgtttgagctggtcccttcttcgcactggaatcagtcttagcagtatctgtattactatcagtagttttagaattatctgcaaatactgcatttgtagaaccaattaacaaaccaacacccagtgctacagctgaagtagcagttaaaattttatttgaatacttcaaacctatcctccgtatcttatattttgcattttacttttatattataatatataaacactgttagctaaaatacatttttattaccattgttaccattgagcttctttatttgacactttcattacgaagtgatttaattagcactgtacttgaaagagtgctaattaatacgaaatcaattaggaggcaaatttatgctagtacctacagttattgaacaaactgctcgtggtgaacgtgcttatgacatttactcacgcttattaaaagacagaattatcatgcttagcggtgaaattaatgaccaaatggctaactcaatcatcgctcaattactcttccttgatgctcaagacaataccaaggatatttcactttatatcaactcaccaggtggtgtaatcacctccggcttagctatcatggataccatgaactttattaagtcagacgtatcaactattgcaattggtatggcagcttcaatggcttctatccttttgactagtggtaccaagggtaagcgtttcgcacttcctaactcaactgttttaattcaccaaccattaggtggtgctcaaggtcaacaaactgatatccaaattgcagctaacgaaattttgaagagccgtaagaagatcaacgaaattttgcacgaaactaccggtcaacctttggaaaagatccaaaaggatactgaacgtgacaactacttaactgctgaagaagccaaggaatatggtttgattgacgaaatcatggttaataagaagaagtaattaattattaaaaattattcacactctaaaaggagcttgcactcattgtgcaggctcctttttcttattctcttaaactctcagctaactcatgtagtttcttaaatcggtgattaactcctgacttcgaaatcggaccatccggaatttgattagctacttcctttaaagttaattctggatgcgccaatctaaaacgcgctaaaacttgcaatttctctggtagatcatctaagccgttttcttgttcaatcagctggatgtcttctacctgcttagctgaagctgaggctgtttttttcatattcgcggtatcacaattaaccaagcgattaaccgaatttcgcatatctcgcataatacgcaaatcttcaaagttaagcattgcattaagtgcacccactatatgcaaaaagtcgccaatttttgcggcttcttttaaataaacaatatagcctcttctacgtttagttgctttagcatttaaataaaaataattattcatcaacttacataaatcctcattatggtcctcataagttgaataaatctccaagtgataacgactcgtttctggattattgacactacctccggctagaaatgcaccgcgtaaataggacattgctccttcacgtgaagtcataattctctgcggaattcgcgttaccaaacctttttcaggatcccagatttgtaagttttctaggatttcttgtaccttctgattcaatcgtaccaaatattgattattttttttcaatttcatcttgcgcgagacaatcagcaatggctcaataccataagcaatcttaatcagcttaaaaattcgtcgagcaatcgcaggattttctgtagttatatctaggctaaattgatgatcgtgcaagtttaatacaccattcattcgcaaaaaagcagctaactctgctttggcatgctctggatgcaccttaagcgaagttagctcctttttgacttcactagcataactagccatcattttccttcattcttttacgtgacattgattcaaatgccagattaataatttcttttcctaccttttcaccatcatgaaataccaatccatgacgttgatcgataaagtcatcagtaatgacacggcagttttgctttcttaagccttcaaagtcattcttaacaggctcaagataagcatcataatcttctgggtgaaatttgctcatatcaattttggcaccattaaccagagcggtattgatataatttccacctaagtgatcgttaattacctgtacgtgttccgcatcactaaagtgatctgtctcaccacgctgagtcatgatattgcaaatataaataacctcggcgtcagtctcacgcactgcttcacctaaattagagatcattaagttaggtaaaattgaagtaaataaactacctggcccaagtacgactgcatcagcttgcataatcgaagccagtactggtaaaacagctctaggctcttcatccgaatcagtatcggtcacccagacacgcttaatccgcttatctttagatgtgatttcagtttcaccagactccgtagttccatccacgaattctgcgtttaaagtcaatggttcattggatgctggaaaaacatgaccatcaattttcatcatttttgacaaagattgaactgcatcaaagatattgccatgcatttcattcaatgccgcaataattaaattaccgattgcatgtcctgaaaaaaaggaatcggatgaatcaaatcgatactgaaaaatattcttttcttcctgaggtaagtcactaagtgataccaaaacattacggatatcaccaggtggaactacgttaataaagttacggattgaaccagatgaaccgccgtcatctgaaaccgttacgattgcagtaatttccgcgttttgatcttttaaggcattcaaaataactggtaaacccgtaccgccaccaattacgactacacggggacgtctgcctttaatcacgcgaacaatccttgtttctccatatggcacaggtgcgcacctactttctaatataacgactcacttcacggtgagtaatatcgactggatattttttagctaaatctcgtgccaactgttgggcaattgaaacactccggtgttgacccccagtacaaccaattgcaatggtcaacttttccttcccctctttgatatatccagggatagctgtttcaagcaaatcaagcaattttttataaaagacctgtgtttcttctttgttcatcacatagtcaaatacacgcttgtccagtcccgtaaatggtcttaattctgaaatataaaatgggttaggcaaaaaacgcacatccattacaatatctgcatcaattggcatcccatacttaaagccaaatgacatcacttcaattgaaaatggctgccgcttgcgatcactaaatgtattgattaatttttgctttaattccttagtcgacaagtttgacgtatcgataatataatttgatctatttttaattggcattaaaatacgacgttcttcttgaatgccatcaagcaagcgacctttgccattattggctaaaggcggaagacgccttgtttctttataacgagcaaccaagacatcatcggaagcatccaaaaataggatagtagcttgcacattgccattatcttcaagtgaattaacttcatccaataaatcgcgataaaatgtcttaactcgtaaatcaattactacggctaccttatgaaagtcattggaattattaattaaatcccaaaaactacctaataaagttggaggaagattatcgactacaaagtagcccatatcttctaagtcatgagcgaccacagttttacctgctccgctcatgcctgtgactattaataattgttttttctcatcagccatactgaaatcctcctctttacaaattatatcataccgggtgtgtcataattgtgcaaaaaaaagaagcctttcggcttaaatttttatcaaatattaacggtgcataaatgcaaccacaatttcattaatgccaaagactaataaccagaatgcaactaaccatactaagcttaaggctgcgattactggattaataattaagaagaaggcaataatcaaacttaaaatattcaaaatcaagttaaatacaaagtatccggttgaaaatgcacgtaagtgccatgaccaagcaatacctacaactgaatcaacaaagaaccagattgcaaataagtaagcgatagtcaaaccaccaatatcatatgagcaaatgaacaagataccgataatgatatctaatacacctgacacaattgctacccaactacgtgagaaaaattcacgaaagcgtgagtaagcagccaaccatacaataccttgaacgattgatacaatagcaaaaatcaagacaaatgcatgcaaccctttagctgggtgacgtaataacacgaacgcaactacgaccattaagataccggcaataaatgcgccccagtcaaagccgtgattatctctagaactagaaaaaatatccatttttattcctccttgcagactattttacacttattcaaggttaataaaaactattggctattgtcttctagcctatttttttgcttcttttgttagtttagtatcacgttctaagactggtttcaaatactgaccagtatagctttctttaactttcgctacttcttctggcgtaccggtagccacaatttgaccgccacgttcccctccttcaggacctaagtcgatcagccaatctgcatttttaattacatcaagattatgctcaataattaaaaccgtattgccttcatctaccaaccgctgcaaaacttctaataaacgcttgatatcatcggtatgcaaaccggtagttggttcatcaagaatatagaaatttttaccagtagaaagcttttgcaattcagcagctaatttcattctttgagcttcaccaccagataaagttgtagcggattgacctaatttcacatagcccaaacctacatcaacgatagtctggagtttacgctgaatcttaggaatattttcgaaaaacttagttgcttcattaatcgtcatatcaagcacttgagcaatattctttccccgataagttacttccaatgtttcagaattataacgagtgccgtgacaaacctcacatggtacatatacatcaggcaaaaagttcatttcaatcttgataattccatcaccatgacaggcttcacaacgtccacctttgacgttgaacgaaaatcttgctttagtataaccacgcaattttgcttcattagtttgagcaaataaggttctgatatcatcaaaaacactagtataagttgcaggattactacgtggtgttctaccaatagggctttgatcgatatcgatgattttttcaatattcttgtaacccttgattgacttatacttacctggcttagttgaattattgtttaatttttgggctaaagcgcgtttcaagatcatattaaccaaagtagatttaccagaacctgagacaccactgaccacaataaatttgcccaacggaaaatcaacattaatattctttaaattattttcttgagctccagtaattgtaatctttttaccattgcctttacgacgcttcaatggaaccggcacaaattttttaccagacaaatattgccccgttaaagaatcaggattctgctctacttctttaggagttccttgtgccataactttaccaccgtaaacaccggcaccaggtcccatatcaaccaaatagtcagcttgccgcattgtttcgtcatcgtgctctaccacaattaaagaattgcctaaatcacgcattctctttaaagaagcaatcagccgatcattatcacgttgatgcaaaccgatagatggttcatccaaaacatacataactcccgataagtttgagccaatttgagttgccaaccgaatacgctgagcttcaccaccagacaaggtattagctgatcgagaaagagttaaataatctaatcctacactatccaagaatgaaagacgatcgcgtacttcctttaaaatcggcttagcaatcatagtctcttgctcgcttaatttgacgtccttaaagaaatcaagtgctttatcaatagaaagctccgaagcttccgcgatatccttgcccatgactttcactgctaatgctttttcattcaaacgcttgccgtgacaagttgaacaagtaagttcagtcatatatttgcccatcacatcacgcataaacttggacattggtcgtttataacgccgctcaacattggccattactccttcaaatggttgaacggtatcattaacgccaaagtcaccagttacatggaatttcaccggcttagttgagccatgcagaataatgtcgcgttgacgtttagttagtttattaaaaggcttatccatcggaatttttaatgccgtgcaagcttgttccaacatttcagtatagtaattggaagtcttccatggagccagtgcaccttcagctaaagattttgttttgtccggaacaaccaaatcttcgtctactgctaacttcatccctaacccatcacaatcaaggcaggcaccaaatggtgcattaaaggagaacagtcttggttccatttcacccacagtaaagccacactttggacaagcataatactcagaaaagttaagcatttcaccaccaattacatcaacattcatgtagccatctgacaaacgaagtgcagcttcaatagaatcaaataagcgagacttaatgctatccttaacaatcaaacggtcaacgacaatatcgattgagtgacgcttgttcttagctaattcaaaatcctcaccaatttcgtgcatctcaccatcaacaattacacgaacatatcctgcacgttgcactcgcttaaatacttccttgtgttctccacgcttagcacgaataactggcgctaaaatttgaattttcgttctttctggtaaagccatcactcggtcaaccatctgatcaactgattgtcgttgaatcagcgtcccatcattaggacaaattggatggcctactctggcccaaagcaaacgtaaataatcattaatctcagtgacggtcccaactgttgaccgtggattatgtgacgttgttttttgatcaattgaaattgctggatttaaaccatcaattgaatccacatctggtttatccatttgccccaaaaactgtctagcataactagaaagtgattgcacataacgtctacgcccttctgcataaagcgtatcaaaggctaaagaacttttacctgaaccagataagccagtaataactactaacttatccttaggaatagttaaattaatgtcttttaaattatgttcacgtgctccgcgaataacgatcttatcatttgccattaaaattctttccttttcttgatgatttttgcaattccataattgcatcccgcaagttagcagcttcttcaaagtcaagcttcttagctgcttcttgcatttgctcttgcaagttgctaatcattgtcttcttttgcttagccgtcaattcatcaaaattaagatctgcaaaactatcagatttttcttctttttcactcgacggtttagtaatcgaaattacgtcttgaatcggcttaatgattgtcttaggcgttatgccatgctctttgttaaattccatctgaattttacgccgacgcttggtagctttaatcgctgctctcatggaatcagtaatcgtatcagcatacatgattacttcaccattggcattacgggcggtccgtcccatagtctgaaccagcggccgatatgctctcaagaagccttccttatctgcatccagaattgctaccagtgaaacttccggtacatcgattccttcccgcaacaggttaattccaattaagacatcgaacttacctaaccgtaagtcacgcaaaatttgcattctttccagcgtcttaatatcagagtgcaaataacgtactttaattcctaagtccttcaaataatcggttaagtcttccgccatttttttggtcaaagtagtaacaaagactcgttcatgacggtcaatccgtttattaatttcgccaactaaatcatcaatttgaccctcaattggccttacttcaatcttgggatcaagcaatccggttggtcgaataatttgttcaaccttatgatctgttcgttcaagttcataatcacctggggtagctgagacatacaaaatttgattaacatgcttttcaaattcggatagctttaatggacggttatcaagtgcagatggcaaacggaaaccatagtcaatcaaggtttgcttacgattacggtcaccattgtacattgctctaatttcaggcatagtagcatgtgattcgtcaattaaaattaagaaatcatctgggaagaagtccaacaaagtatacggtggctctcctgcttttcgtccttccatatgccttgaatagttttcgattccgttggtatagccaacttcacccatcatttccatatcataggtagtacgttgcttgattctttcagcttcaagcaatttgccttcgccttcgaactttttaacctgcaatttcatctctttagaaattgctcccaaagctcgccgcaattgctcgtcattggtcataaagtgcgtagctgggaaaagcgaaatactctcacgctcaccgatcacctcaccggttaacgaatcaacttcaacaatgcgatcaatttcatcaccaaagaattcaattcgataagcatgattagaattgccggctggaaagacctcaactacatccccgcggacccgaaaacgaccgcgttgaaagtcaatatcattacgatcatattgaatatttaccaaatcacgcaacaaggtattacggtcatattcttcgccttcatggatcatcaagacactgcgcgcatactctttaggatcacccaaaccatagatacaagaaaccgaagcaacaactactacgtcattacgctccattaaagctgaggtagtagcatgccgcaactgatcaatttcatcattgattgccgaatccttttcaatataagtgtctgattgtggaacgtaagcttctggctgataataatcatagtatgaaacaaaatattcaactgcattattaggaaagaaacttttaaactcaccatatagctgccctaccaaggtcttattatgcgtaataactaatgtaggcttattcagcttagcaataatattggccatggtgaaagttttcccagtaccagttgcaccttccagaatctgttctttatatccttttttaaatccagcagtcagtttatcaatagcttgctcttgatcaccggctggtttaaactttgatactaattcaaatttgcgatttttttgtcgtttaatcataaaaaactcctcaagaaaaaagttggacaagcatagtccaactttttaattagtatctatattttactaccgcgaacgtgctttcgcacgaaaaatgcttaattatttaagtaaatctgctaaagccttttgataatcttcagctgccttttctgcagtggcaatgtcttttttgtttacaccaacataggccttaattactggttcagtacctgatgggcgaagtgctacccaggtttcatcatctaagaagtacttcaacacattagattctgggaacccttctaatggtgtctttttgccattttcaatagtttctttttgcaagaaatcttgaatcttaagcactttactaccgccgatttcagttaagtgctcattacgcaacttgctcattaattcggccatcttcttttgaccaccaatacctggcatttcaattgcacgggtaatttcataagcaacgccatacttttgccaaatttcttgcaaaccatcaaagacagtcatcccacgtgaagcatagtatgaagcaacttcggcaaacatcaatgcaccctgcatggcatccttatcacgagcaaatggtttaaacaaatagccatagctttcttcaaagcccatcaagaacttagcatcaccagctttattcatccggtcaacttcttcaccaatgtacttaaagcccgtcaaaacatgcttagtcttaataccaaagtcctctgcaatcttaaatggcaaagcactagaaacaactgaagtaacgatctcataatcaggggttaattgaccattttccttcatatgagccaataggtagtaagccatcaaagtagcaatttggttaccagtcaaaacttggaaatcaccatcagtttttctaactgctgcacccattctatcagcatccgggtcagtagcaataatgacattagcatttacctcatttgccaacttaaaaccaggttcaaaaacatcacggtattctggattaggcttaattgtggttggaaattctggatcaatgattgattgacttggcacaggaatcacattatcaaagccgccttgtctgaaagcacgatcataaagcatcttgcctgtaccatgaagtggagtataaatgatctttaacttgtcagcgttggccttaaccatctctggatcaacagttacttgcttcaattcattcaagtaatcttcatcaacatcttcacctattaactgcaaggtgccattagcacgcaattcttttactggtgcagccttgacagcaaaaatatcagttactttttgagcataagcaaaaagtcgatctgcattatctggtgccatttgtgcaccatcttcaccgtaaactttatagccattgtattgcttagcattgtgtgaagcagtgatattaattccagcgaaagtatgcaaatgacgtactgcatatgaaagttctggtgtcggtcttaaatcatcaaataagtaaacatgaattccgtgtgcacctaaaactctggcagcatgttctgcaaactctcttgagtgatatcttgaatcaaaggaaatagctaccccacgctttttagcatcagcaccattttcttcaattaaacgagctaagccttcagttactcgacctacagtaaacaagttaatccggttggtaccgggttcaagacgaccacgcatccccgcagtaccaaaattaatatcctgtccaaaggcatcttcgatccatttttcatccttgcccaaagtatttaattgatcttttaaataatctggtaaattagtagctttttgccattctgtataaatttctttagcgtccatcaatgtcctctattcattaaaagttggatttctaaagcgctttcaaactgttaacaattttctattatctgctattaattataaaacttattagtcattaatttaagctttagacaaaaaaagacatgtccaatacgaacatgtcttaatgaaaaaacgaataaatttaatttttcttgtcttgtaagtcttggtagtaattatatgcagcttgaccagctacactaccttcaccaactgcattagcaatttggcgtaaatctttttgacgaacatcacctaaagcaaagataccaggcaccttagtttccatatgatcatcagttacaatccaaccatggtcatccaagataccaagatccttaaaaggttcagtttgtggtaaaacacccacgtaaataaagacaccagcaactggaatttctttttcggcaccagtttccttatcgcggtacttaacccctgtgactttcatgtcatcgcctaagatttcttcagtttgtgcattccaaatgaaatgcatcttcttgtttgcaaatgcacgcttttgcaaagttggttgtgctcgcaattgatcacggcggtgaataactgtaacgctcttagctaattgtgaaagataaattccttcttcaattgctgaatcaccaccaccgatgacagctacatcttcatctttaaagaaagcggcatcgcagacggcacaatatgaaacacctttgcctgaatattcttcttctccaggcacattcaaatgcttatgatctgaacctgtagcaataattacgatcggtgcacgatactcattgccatcatcagttttaactaacttatcctcgccatcgagttcaacactttgtacgttgccatacttataatctggttcaaacttcatcattgtgtcgtacatcttttgactaagttctggacctttgatttcagaaaaaccaggataattgtcgatagcatcagtattgttcatttgaccgccatagggaccgcgatcaagaacaagaatctttaagttagcacgcgcagcatataagccagcagtcatcccaccaggacctgcaccaataataattacgtcgtatttatcagccataatctatccttctttctacttacttttgataagcaaataatacaatagatttaacttcttgccaactattttgcttatcttttataaacgaatttcaggctttggttctctacccatcattttcttaatttctgtatcaacatcagcatcttcataaagaacacggtagattgcctctgaaattggcatatcaatgcccttttcttcacataattcgtgaacagctttaacagtagtagcgccttcgacaacttgtcccatatttttcaaaacgtaatctaaagtcttgccttcgccgatttgtttaccagcacgccaattacgtgagtttactgaagtacaagttacaattaagtcaccaatacctgacaagcctgagaaggtcattggcttagcaccaaagtattgcacacccaaacgagtgatttctgctaaacctctagtcatcaaggcagctttggcgtcatcaccatatccttggcctactaaaatacctgcagcaatcgcaattacgttcttaacggcaccaccaacttctacacctactaaatcatcgttagtgtagaaacgaacgtagtcattggagaacaattcttgtacccgcttagcattttcttcattagttgatgcacatgcaatcgcggttaaatctttttgagcaacattttctgcgtgactaggacctgaaattgcaacaatcttatcttcatcatctggataaatttcttcagttaaaatttcagaaataagcttcttactgcctggttcaatccctttagttgcagtaactaacagtggcttagcacccgtcttatctaaaaccttgcgtacgtttttagcaacgattctaactgccttagttggcaaaacaaataaaacaagttctgccccatcaagagctgcttccaaatcaccagtagccttggtattctcatttaatttccaatccttcatatagtggctattggtgtggtgagcgttaatttcttcattaacactatcaatgttaccgtaaagagttacatcgttaccattatcggctaacattgaacccaatactgaaccccatgaaccattacctaaaactgcaatctttgtcattttttctctcaaactttctaattaaaatcttttattaattctaatctcttgaatacgggtattttaatccactaccatccaaataccattttggattaacgactttccgccgataaatccataaaataattgtagcaataaagaggattaaacttaatgcctgtgatactcgtattataccaaaaatatacagactatctgtcctcattccttcaacgaagaaccttactacactataccaaagaagataggtcatgaaaacttctccctgcttgaagagatgttttttatgacgcaaggatagaattaagattaagccaatcaaattaaaaaatgattcgtacaaaaaagttggttgataatacgtcccgcctattttcatttgctcaataataaattgtggtaagtgtaagctttgtaaaaaatgaagagtagttggtgcgccgtgcgcctcttgattaacaaaattaccccagcgtccccaaatctgagctgccatgactccaggagcaatgatatccagcattaaaaatggaggtagcattcgtttataacagaaaatcaacagcacaattaagccggcaattaaaccaccataaatcgcaatcccaccattccaaatcgcaataatttgctcgggatgctgtgaataataaccccattcaaaaatcacataataaatacgtgcgccaacataccctaacggtactgcccacaatagcaaatcgacaaaatcatctggaataatttgacgtttttttccttcgttaatcgccatccagcaagctaacataatggctactgccataatgatgccataccatttgacacttaaattccctaaatgaaaggccaccggattaattactaaattagtcattatgcggcaccttattcgtatcttcttttgagtgctctgaaatcagactagtcaaattattatcaaaagtttgagttgcatcatagcccatcttcttagctctgaagttcatcgctgcaacttcaataataatttcaatattgcgtccaaccttaactggaatattaacctgtggaattggtacattgcagatttcacgcgtattttcttgaaaacctaggcgatcataattagcttttggatcccaattaaccaaattaattaccagttggatttctgttctattttttacggcaccggcaccaaataaattcatcacatcaataatgccaattcctctgatctccattaagtgctttaagatctttggtgcttcacccacaacggtattatggtctttttgaaaagcatctactcgatcatccgcaattaatctgtgtcctctttgaactaatcccaaagcagtttcagacttaccaacaccagatgcaccagttaacagcacacccatccctttgatttcaaccaaaacaccatgaatgctggttcttttggctaaacgagcacgcaagtattcagttaaaatactggatatgtaggtagttgactctcttgtacgcaaaattgggattttgtgttcctctgctgccgtagttaattcttccggtacaggcaaagagcgagaaatcaaaaaacacggtgtagccttagtacacattttgttaaagacatgcattctaatatcatggtccaagcgtgccgcatatgaaatttctgtccgacccaataattgaattcgttgcgcaggataaaaatcaaaataaccagttaattctaatccagggcgataaatatcagaaacataaatttcttcatctttgatatattcctgtccttggtaaacttcaaggatactctgattgtcctggatcaatttgcttaatctaacttcatcagccatattaggcctcctaactatttatcaatatctttagtggtgacatttctagctttttttcttggtctaggaccagaagtactagtagccttaaaccactcacgataacttccactacttggcatattatcttgatttttccttccagtaaaccgataaataagccaaatgattaaaatcgcaattacagctactggtaaaagtaaaataaatgccttaaatagaacaaacaataaacttaaaataattagcgctactaaaacaagcgttacaatttccattaaactcattttttaacctaatctggattctcttgactaagcaaccactgtaaataggaataaataaacggttgcaattttccgtccattactccttgagcgtcagctgtttcatgacctgtccgcaaatctttcactaggttgtaaggatggaaaacatatgacctaatttgtgatccccagccaatctccttttgatcgcctttcagagcctgcttttgcttacgctttttttcttcttctaagtgaaaaagctttgctcttaattcattcatcgcagtttcacggttttgcaattgtgaacgctgtgcctgagacgtagtcacaattcctgttggtaagtgcgtaattctaacggcactagaagttttattaatatgctgcccaccagcaccactagagcggtaaacatcaacccgtaaatccttaggatcaatatcaatttgaatactgtcatcaacttctggaatcacttctacagaagcaaatgatgtatgccgtcttttagccgcatcaaatggcgaaattctaaccaaacgatggacaccattttctgatttaagcattccgtaagcatttttacctacaattcgcgcactaacgctcttcaacccagcttcttcaccaggctcataatcgttgatttcaaatttaaaaccagctgtatcacaataacgttgatacattcttagaagcatctgtccccagtccatcgcttctgtaccgccagcaccagggtgaatttccatcaaagcattatggctatcatacttacccgacaagagcaggtctaactcataattatgaaaatcttcttgcagcgtagctagatccgcttcaacttctttttgcaagtcaggatctggttcttcacgcaaaagttcaaccgcagtagtttcgtcttcgtagctagtttgcaattttaaaaatgaatcacgtttttcctttaatcggttggtttcactaattaatttttgcgctttttcctggttattccaaaaatcaggctgcgccatcttgttttcattaatttcgatgctttcatcaatcgcatctaagtcaaagagaccccctaaagtgatttagacgtttttttagttcatctaacacactttgaatttcactaatttccatttttacctaccatcttttattttattgcaaaaaaagggaagctcttaactcccctttttctttattaacgactaagattttgtctaatttcagccttcatgaacaaacgagttacatcaaattcaatatttgaaatcatttcttcaaacattctgtaaccagaatcttgatattcaactaatgggttcaattgaccgtatccacgaagaccaattgattgacgcaactgatccattgcatcaatatgatcagtccaacgatcatcaaccacacgcaagataactaccttttcaaattcaagcatttggctaggatcgcctaaggccttttccttatcttcgaagttttgctcaacaatgtcataaagcttcttcttcaaatcttcaacactaatagtcttgaagtcaattgagtcagttaccttgtctgaagtcaaacttgaggaaatgaaatcgcgtaatgagtcaagacgccattccttgcgttcaccttgagtaaacattgctacttggtgatcaattgttctgtgaatcattggaattaaaacattcttcaatgacttatcagcttcaatgacctgcattctttcgccgtagataatttcacgttgaatacgcataacatcatcgtattgcaaagtttgcttacgagtatcatagttattaccttcaacacgtttttgagcagattcaacttggcgagtaatcaagcgactttcgataaccttatcatcatcattatctgataaacgatccaagaagtccttaactcgatcaccaccaaaacgcttcatcaaatcatcttcaagcgacaagtagaatctggtgtaacctgggtcaccctgacgaccagaacgaccacgaagctggttatcaatacgacgtgattcgtgacgttcagtaccaataactgccagtccaccaagttctttaacaccaggcccaagcttaatatcagtaccacgaccggccatgttagtagcgatagttacggcaccacgttgaccagcgttcatgatgatttgagcttccttagcgtggttcttagcgttcaaaactgcgtgaggaatacctgctttatcaagcatcttactcaaacgttctgaactttcaatggcaacagtaccaaccaaaacaggttgaccattagcgtgacgcttcttaatttcttcaactacagcgtggaacttagagtccaaagttggatacaaaatgtctggcatgtcttttctggcaattggacggttagtaggaatcgtgattacctgcatgttgtaaatttcacggaattcttcctcttcagtcttagcagtaccagtcatacctgacaacttcttgtacattctgaagaagttctggtaggtaatagtagcttgcgttcttgattcttcttgaatcttaacgccttccttagcttcaatagcttggtgcaagccatctgagtaacgacggccttccattacacgaccagtgaatgagtcaacgatcaaaacttcgccatcttgaacaacgtagtcgatatccttaagcatgatgtagttggcacgaagagcttggtcaatgtggtgaaccaacttttggttttcaacatcgtacaagttctttaggccaaagtgttgacaagccttttcaataccagttctggtaagtgaaatagtcttagttggccagtcaatcttgtaatcgccgtgatcttcatcatcgtcggcatcatcatcgctcttgtcttcagtcaaagtcttaacaaagcggtcagcacggatgtaatcactgtttgcttgttcagcttcaccagaaataatcaaaggagttctagcttcatcgattaagatagagtcaacttcgtcgatgatagcgtagttcaatggacgttgtaccatttgttccttgtaaacaaccatgttgtcacgcaaatagtcaaagccaagttctgagttagttgagtaagtaacatcacagttgtaagctgcacgcttttcgtctggtgacattgagttcaagttcaaaccaacagttaagccaagccacttgtaaagttgacccatttcttcttcgtcacgacttgaaaggtattcgttaacagtaacaacgtgtacacccttgccttcaagtgcgttcaagtatactggcatggttgctgtcaaagtcttaccttcaccagtcatcatttcggcgatgttaccgtagtgaagtgcaataccacccaaaatttgtacgtggaatgggtaaagtcctaatacacgcttagcaccttcacgagcaactgcgaatgcttctggtaaaagatcatccaaactttcgcccttctttaaacggtcacgaaattctggtgtctttgcttgcaattgttcatcagatagcttgctcatttcatctgcatgagcttctaccttagctgcgattttttcaaatttcttaagttctcttttatcgtcgttatatagtttctttaaaatatttaccattaaatcggtccttatatgtcgtaaagtctaaaaatacagaataattttaacatgtttatcagcaaaataaaaatattctaaacaaaaaaccccacgctcaaacaaacgcgaggttttgaattaacgagtattttaactcaattattcgttagtttcaattaagccgtaacgaccatcgtttctacggtaaacaacgctagtgccgttagtttctgcatcttcaaaaacgaagaagtcatgttccaacatgtccatttgtaaaatagcttcttctggatccattggctttaagcttacacgcttgttacgaacaatatcaaattcgctaggcttcttttcttcttcttcaggttgttctacaaagaaatcttgtaatcccttttcacgactctttctatttacacgagtcttgtactttctaatttgacgttcgagtttttcagaaacgaagtcaatgctacgatacatatcatccgtggtttcttcggctctcaaaactaagtatggtaaaggaatagtaacttcaactttagctgagtgatcacggtatactctcaagtttacgtgtgcaatcacatcttgattcaattcgaagtacttctctaacttgtttaaccgcttttctacataacttctcaaagcatcagttacttcaatattttctccacgaacattgtactttaacatataagattctcctttcaccgctatgcggtttttctttacaaatttattataccaaaaaatgtaagcgtttcataacaaatctaatgacaaattgaaaagctttcaattttcatttcgggaaaaccctgctgtaaacggtcccgcgcgtgatatagcgtgcgcccggtcgtgtaaatatcatccaaaattaatacttttcctgaaactatattttccttgattttaatatttttatcaatcaaaaagctttgaggcgttttaagccgctcctctttgtttttctcaccttgggcatgactacccgattgtttaatcagaagcggtgtcagcggcaaaatatcagcataaatagcaaaaattgtatcaaactgtcgtcttgattgatgttcaggtgaagtgggcacgggcacataaaagtcatagttagttttacacaaatagtcataacacaaatcttgcaatacttcccgcaaaacataatctccacgccgcttatacgcaaccatcaagtcatgaaaagcagaattataacgatataaagcatgattatgcagaatattttcgccataaatggcttgccaatttcgacaatcgctacacataaagccttgacctagttccttatcacagccagagcagcgattgtctgctaacttttcaaattgttttaaacattgcaagcaaattttactttttcgcgctgttttaaaagaaaaaagttgtgcaaattgtaccggtggagtaaactcctgctcacataataaacaagttctcatctattcatccccttgatctgcttaatactctgtcgaatattcttggtataacgatgataacaatacaaaactaagcccgtttggtcatcgtgagcccgaccaactcgacctgcaatttgcaccaaactagcagcggtataaattgcatcatctgctgcaataataattacccaaacatttttaaaagttacaccacgctctaaaattgtggttgtcaacaataagtcatatttacgatcacgaaaagcctgtactttttctaatcgttgcggatcttgtgcatgaacaccggccaatttaattttattttgcaactttttccgcaaagcttcttgataaagcggaatttcttcaatccgtggtacaaacaaaagcaaaggatgaccactttgaatgacttttttaatctcctgcattaatttaggatgaatttgtcccttccgcaaaaacggcctgataaaaagcctttctcttggtacaggcaataatccaccatgaaaacgccgatttaagcgcaaaatttctaacttccctgttttagcttccaaaagcaaatcgttcgttggcgttgcggttaaatacattcgagtcccagttgttttaaccgcatttttggccgcaaaatgtagttgcggattacctacataaggaaaagagtctacctcatcaattaccaataaatcaaaggcacgataaaacttcattaattggtgtgtagtacaaattgtcaactgctctagccctatttccttaaattcacggccatgatacttaccgatctcaacttgggcaaacgctgccgaaaatcttggaaacagctcatttaccacatcaattcttggtgtagcaatacaagcgcgctgtccttttttcatacatcgagcaatcaactgaaacaacatctcagttttacccgccccagttacagcatgaaccaatgtattttttctttgttcaaaattttgtactaatttatccgaaatattctgctgcaatggggttagtttaccttgccagcttaatcccccgtttttaacatgagaaaaagtattattactgtcttttctaataagccaatcgccctcatttgcacgtcccaagccaatacaaccacgacaataatatttaccattaggcagtcgactattaacttggctgccacagcgattgcatttacctttttcaattactggaattttgcggcatccctcaaatgtgctagaatcctcttgactaacaatccattgacgacctgataatagagtcaaatcttccatatttttacctccctattatctattacgcaaaaagaggcgattattttgtcagaaaaggaaaattttttaactattaaagaaaacggcaccggtgaattaattatcaaaaagagcagattcattgccaatattgcccgcaccactactactgatgcggcaaatgattttattcaaaaaatctctaaaaaatatcgcgatgcttcgcacaatacctttgcctacacgatcggcttaaatgacgaccaggtcaaagaaagcgataatggtgagccatcaggtacggctggtgttcctgaattaaaagcattgcaattaatgaatttaaaaaacgttacagtcgtagtaacccgttattttggtggaatcaaattaggagcaggcggtttaattcgtgcctattccaatagtgtcaccaatgttgttgaaaaagtcggcgtcattaaacgcgttttacaacaagaattaatttttagcgtaccctataaccgcttcgatgaagttgatcattacctaaaacagcaaaaaatttttattgccaataccgaatacggtgtggatgttaaaattcatatttttgttaacgatgaccaacaagctaaacctaaggaagacctaactaatttattggccggacaggttacctttactaatggtgaaaaacgctataatgaaattcctgttgaagctaataattatcatgaacaataaaaagagcatttggatatttccaaatgcttttttgctacttattattttttttactcttcaattgatctggtttttcgtctcctaagtgccaaacttcaattgttggatcagttttactcttttgattaataattttctgaattacatgcatcaaaggatggtatttttcacccaataaaccaattgattccacaaaatactctaaggcaatcagcaagcctaagatcagaagccaagtgccccaagttggcgaaagcaggaataataaagaaataaatgagaaaaccaatgataatgcgtaaatagtcaataccgtctgtcggtgcgttaaccccattcgcatcagctggtgatgtaaatgatgcttgtctgcttctgaaattggctttttgtttagctttctccgaatcattgcataaacggtgtcagtaataggcactcccaaaatgataattgggaccaacaatgaaataaaagttacattctttaaccccttcagagataaaacggcgatcataaaaccaatataaagtgcacccgtatcacccaagaaaatttttgctggatggaaattatatggtaaaaagcccaataaacaggcagctaacataaaacaagcaattgggacatatagctgatgagtgtgcaagaagaaataacctacgatccccatggtagtcagagagatcattgaaaccccatcagctagcccatcaagtccatcaatcaagttaactgcattagttaaagctaagatccaaaaaatagtaattgggaaactccaccaacctagatttacttcatgtgcgatgaatggcacctttaacacattcattctgattccagctaaaaagtagataatcaatgaagcgataaaaatcccaaacattttttgtctaggttttaactccaaaatatcgtcgatcaatcccgtcaaaacaattacgcttgaagcgagtaaaatcgaaaaaatttcatgagtcggaaattgctcacgcaacagaacaaaagtaccgatattaaaagtaacaaaaatccccagtccaccaatcgttggcattggtttcttattaactcgccgggcattaggattatcaacagctcctaagacaaaggcaagccgtcgaataaacggtgtaattgccgctgaaataattactaataagaataattcaacaataattttaaacatatttggctactttccttatttacttgttctaattatacaagtagtcagtattttgcacaaatagcaaaaaagtttggaaaaattatcttccaaactttttaatttatttagcgatcgccacaactcttttttcacggataacggtaatcttaatattacctggataatcaagttctttttcaacctgattacgaatatcacgtgccaaaataactgtccgatcatctgaaatttcgtcaggttcaaccatcacacgaacttcacgtcccgcttgaattgcataagcctgcttaacgccttggtagctcttagcaatcttttccaattcggtcaaacgtctaatataattttccaaactctcgcttcttgcaccaggacgagcactagaaatcgtatctgctgcaacaacaagttcagcaataaacgacaacttaggcacatcgccgtggtgtgcagcaatcgcatttactacaacatctggttcatgatatttacgagttagttcaaccccaatttctacatgggaaccttcaatatcatgatcgatggctttaccaatatcgtgtaataaccccgcgcgaactgctaatttttcatccaagcctaattctgcagccatcgtgcctgctagcttaccaacttcaattgaatgtgacaaaacattttgtccataagaagtacgatatttaagacgacctagcgtcttaactaattcaggattcatccggtgaattcccagctccatcaaagcactttcacctgcttcatagatgtcatcgttaacttcttttctggccttatcgaccatttcttcaattctagctgggtgaatgcggccatccttgattaagcgttccatcgctcttttggcaatttcacgtctaattggatcaaaaccactcaaggtaacaacctttggcgtatcatcaataattagatctattccagtcaaagcttcaaatgaacggatattgcgtccttcacgaccaataatccgtcccttcatctcttcatttggtagatcaacaacagatacagttgtttcggcaactgtatctgccgcgctactttgaatagcatccacaatgacctgattagcataatgatcagctttagcttttacttcttcgttactatttctgatcatctcggctcgttctttgactagttcatcagataattgactaagcacaatcttcttggcttcttcctcatccaacttagctacgtcataaagcttttgccgtctagtttctactaattcttcagcctcagttaattttgcctttaagctagcatactgctgctttaattggtcttccttttgcgtgagtccactttcacgttcatctaataaagaattcttatgatctaaggtatcttcacgttgttgtaaacgatttttctcccgagctaaattatctttcttggaatttaactcatcctcggtcttttgcctaaaatcacgaatttgttcttgagcttcaagaattttttcttttttagtattttctgcactttgcttaacagccgctgctgcttgcttttgtgcattaacttcagcttgtgctgcagcaacctgtgccttagcatcagctaaaatgtggtcagcatcattctgggcattttgagctttttgttcccaagaatgcttgcgaattgcataaccaaccactgaacccaccaagaatgaaacaatggcagttgcgacgggaatcataattgttaacatattattcatgattactatcgccttttttagaattattcacacaacttttatgataaagaacctatctgttcatgtcaattaaatcaaaaaaccttggaaaataaatccagggtttttgacataattatttagcttgttcagactttttatctgtagcagcttctttttctgtcttggcttcttcgcgcttctccttgatcttttctggatcttcacgatcagcaattgacttttcatcaatcccgtaagcttgacgcacttgcttttggatatcttgataaatatctggatgctcttctagatacttcttagcattctcacgtccctgaccaattcgatcactcttgtaagagtaccaagaacctgctttatcgataatgtccttatcagcagccatgtccagtaattcaccactttgtgaaattcccttaccgtacataatgtctacttctgccaccttaaatggtggagcaaccttgttcttaacaactttaattttaactctgttaccaagaacatctcctgattgcttaatctgttcagctcttcttacttccaatctaatagttgagtaaaacttaagagcacgaccacctggggtagtttcaggattaccaaacattaccccaactttttcacgaatctggttaataaagatggcaatagttttggttttagaaatattacctgataacttacgcaaagcttgactcattaatctcgcttgtaaaccaacatgggcatctcccatctcgccttcaatttctgctcgtggtactaaggcagcaacagagtcgactactacaatgtcaattgccccactggaaatcaaagtatcagcgatttgcaaaccttcttcaccagtattaggttgtgacaaaattagtgaatcaatatctacacctaaagcttcagcgtaagcaggatccattgcattttcggcatcaatatatgctgcagtaccaccacgcttttgcacctcagctacagcatgaagggctaccgtagtcttaccagatgattctgggccataaacttcaataatacgaccacgaggatatccacctacaccgatagcagcatctaaagctaatgaacctgttggcactgttgaaatttgcgtatcagctttttcgcccatccgcattacagcacccttaccgaaattcttttcgatttttttaagcgctgcatctaaagcagcctgtttttcgtctttggccattaatgtcctcctatttttcgtacctaataattatactttgaccgccgtccaatttgcaagagaaatgcaaacgaacgttcaaaggattttttaccctctattatttattacgctaaaaatcgccattatttttttacaaaataaaaaaagaagcaaatgcttctttttaatcattcttgacttaatactattttacattgagcccttgaatacgccccatgattggtggaagtaatcgtaacctgagtaaatagtaaagatcaacgcaaggtaaagtaagatagtaccaatgtggaagaagtcaccaatcaataagaaaatgattgataacatttggcaagtagtcttaattttaccaggcatctttgctgctaaaacttgtccttcattttctgctaagatcaaacgcaaaccagtaacagccaattcacgacaaacgatgatagctactacccatgctggagcaagtttcaattcaactaagaaaatgaaagcagtcatagttaacatcttatcagctaatggatcagcaaacttaccaaaattggttaccatattacgtgaacgcgcaatgtgaccgtcaaaccaatcagtagccgaagcaacagcaaaaacgatagcagcaataacacgactccaaacaacagttgagcctgctgcttgaacactagcattcccaccaaaaatgatgattaacataaatactggaatcaaaaagattctaaaaacagtaagtttattaggtaaattcattctaacactcctagattttaattgttgttattatttccaccatcattgccattgttagtgtctgctgatgattgagtagtagatgattgttgagtttgactactttgttgggtttgttggctactttgagtagtagtagatgattgttgacgactgctttgacgagtagcactgctttgagtagttgtacggctttgggtagaactactattggttgtattgttattagtagagcccgtattattagaactactattattttgactagtagttcccttagccttaccaatcaacaaagtaattgtcctgtacgcattgtttgctgtatatgggattttcttacctgcaatagtgattgaagtaccattatcgttgcctaaagtaatcactactctctctgcattgcttggcaaagtcatagtgtgcttttgattagcaagtaaagttgattgccagctattagcattaccattgacttgtacacccgctgaaatattttggttttcaccagcacgcacaactaggcgacggtttttattcaagccagtaactcggtactcattgtcactaaccttagtaaccttaactttattgactactacttttttagctttcttagaagatgacgatgatgacttttgtgatgaaacagttacatcattattatcagcttggttcttttgaccacctgaagaaagacgagcatacaaaacgtacactacaagaattacgataattacaccaagtccgatcgcaattcgtggcaagtaattcttccacaaatttttcttattgtcggtggtttctcgtacttcttcactcttattatcaatcgagttttctacgtactcatctggcttagcttctggtacatcatcgtggtaatcacttaataactccttaccatccaagccaacaacttgtgcatattgacgaataaatgctctaacataaaaatcgcctggaagtttatcaaattcattcttctcaatcgcttcaagatatctgctctgaattttagtagctttttcaatatctgcaattgaaagtcccttagcctctctggcgctctttaatttatctccgatatctgccatatttacctcttcaaattttaatttatcatgttgagtataccataaaattctcattacaacgtcttagttataaaagccatccacctgtaacataaattgtctgtcctgttaaataactactacgtcgatctagcagtgttctaacccagtatgaaatatcactgccattggcccaacgaccaactgggatttcatcttttacctcttgaatcgtatcctcagaaaagaatgcattcattttggttttaaccgcaccaggcgcaattacattaaccgttaagttattggaagcaacttcacgcgcataagcctgagcgaacctggttataccacctttagttgcactatagacgctttctaatgcactacctgcaccaccatagactgagcctaaataaactatacgactaaaatctcgtttcatcagttgtggctctaacaatttagttaacttaattggcacagtaagattaatattaatcagatcagtgatatttgctaatttttcatcacctaaaaaaccatacttagtaattccttgagcaaaaactactgcattaactggcaacaagtttttaacaaaatctgttaactgtgcatcccctgtcgcaaaatccaactgtagcgacataaaatcctggtcaggatgcttagcaaacagctcttgaactaaattttcagctttttgagaattagaatgataatgcaagtataatgaccaaccggcatctgccaaatctcgacaaatatcttgaccaataccgccagttgcaccaaagacaattgctcgcttcaactttatcaaccccttacttgttttctaagtaagcagaacaaagttcactgtctttcataatcttttggcagtagtcataaaactgatcaaaattcatcgcctgcaatttagctatattttgtgttaaattttcatgatctaaattttcttcaattaattcaattgccaaataagacagatcattacttgtcctagcagtgcgtgctaaccattctttcttttgcaaaatgaagttttgtctaataaaacggtattccgctgaatttttcttaattggttccgtcaataccctctttatttctgcaattacttcttgagcttgaggacttacaccaaaaatagtagcaaaatcgccctgcctggtgtaattaacagaaatctgcagcgaatccattaacaactgcttttttctcatttcttcaaaccatggtcccattgcacttagttttgattctaacattatttctaacagaatttgagtcaaatcaaagcttaataatactttcttaaagtttttaaagcgaattcctaaaccaaaggaattagaattacctctggctggcaagacttgatcatgtaacatgcgaaaactaacttgtttttcagctgtgcttttacctttcccgtgcaaatatttttgctgcagctttcctacttgccgcaaaatcgtttgcacttgattatcagaaaaatcaccgcaagcaacaaattgcatcttttctggcacatacttagcctcataaacttgggtcaagtttttcactgtaacttgattaattgattctttcgtacctacaacttcgatccctagattagaatcaccaaacatatcatgcataatcgcattatttacgctccaagttgggtcatcctgatacatggccaattcttgttcaataatcggagcctcttgcgcgatattttccttagtaaaatacggctgccctaccaattcaaacaagagatcgatcattttaggcgtatgctcaattccactacaataaaacattgtttcattaaaagacgtgaatgcattaacgtcagcaccaatatcttcaaattgcgttgacaaatcaccatcttttttggcaaatagcttatgctctaagaaatgagccgaaccggcaaccttttgtggatcactactaccaaagtcaacaattataccgaaaaatcgttgataaaaatgtggctttaaaataatttcggctttaaagcctgactgatattcttttttgataatttttggtgtcatcattttaaaacataactttcattaaagaataaattttgtgcgaaagctactaactgcttaggtgtagctctcctaattgcattttcacgatcaaagtctaaatatcccgagaacaattcatcacgcaacatttgacccatctgccagttttgaccgtctagaccaatcttcatattacgcaaaattgcctttttagcctttttaaataaatcatcttctacttcgccctgaactagtttacccatttcggataaaataatttttcgagccgctgcaatcttactaggatcaagtcctgcactgactaaaaacaaagaattattggcaaagcagcttgcttcaacattataagctgctcccaattgctcccgaatttgcgtaaataatttagatgattgatcacctgccaaatattgcgataataatattcccattacttgaccgcgataatcaatactttgttctaaaccaaagcccattaacaattgagcttgcacatttccttgatcatcctctttttcaatcaactttcttttagctggaatagttagactagctgtttgaaatgatttagttaaaccagtttgttgaaacatagcctgagctaatttagaaaccagattattatccctggtcattcctaaaatttgcattggtacattagctaaattacgccaataatgcatcatagtcgtgctagtcgcagctttgatttcatctagtgagccaataaatgtctccgcataatcaggttgatcctgataccacaatttaaaaaaatgctccaacgcataattagatggttgttcaatcagttcttgatattcttctgctaattgacgtttagcatattccaccaaaggttccgcaaaattaggttgattaactatttgtgcaatcacattaagaatttcttcatacgtataatgtggatccaaaatctcaatcggctcaacaaaattggcataataagtcaaaagtatttctttaccaaaaacttgtggcataatctccagctgtaaatcatataattctgccaatcttttttgttgtaaagcaagtgacggataacttaagctgctattcatctgtattcgcgctagcaaactagcataagctaaattatgtttagtcagcggcaaacgcaaaaaacagccaatagcggctgttgtaaactttttattttttctaattgcaatattagttgtgagcattgtttgaattaccttcattctttattggtggcactaaaacttgtcgtggcttagagccttcagatggaccaacaatccctttagcttccatttcatcaacaattctagcagcacgattataaccaattctaaacctacgctgcaacattgacacgctggccgtctgttgacgtcgtactaaatcaacagcttgctcatagaattcatctgctggctcatcatctttactatcagcatttgatgaattttcaccttttttaggaatcattgtctcatcataactaacctcttgttgcttcttaacccattcaattacgcgttcaacttcatcactagcaatataagcaccttgaacacgttcaggtttagatgccccaattggcatataaagcatatcaccacgaccaagtaatttttctgcacctgtttgatccaaaatagtccttgaatccactccacttgatacagcaaaggaaattctcgatggtacatttgctttaatcaaaccagtaataacatcaacacttggacgctgagttgccaaaatcatatgaattccggcagcacgtgccatttgtcctaaacgaacaatcgcgccttcaacatcgtgaccaccaaccatcatcaaatcactaagttcgtcaactacaactagaatataaggtaacggcttcatcactggtttagttttatcacgattgttttcagcaactttttgattatattcactcatgtttcgcacgccaccagccgcaaatagcttatatctgcgctccatttctttaacaactttgcgcagtgcatttgcggctagcttagcatcggtcaccacagggatcaataaatgcggcacaccattataaactgaaagttcgaccatcttggggtcaattaaaactaatttaacttcttcaggccgcgccttcattaaaatactggctaaaattgtattaatcgctacggacttaccagaaccagttgaaccagcaatcaataggtgtggcatcttagctaagttggcagaaataatgcttccagttacatctttacccaatggtacatccatcggatcgcttttggctttattatcttgatgttccatcacgtctttgaatgaaacaacagacgttgctcggttaggtacctcaattccgataaagggcttaccaggaattggtgcttcaattcgaatatctttagccgcaagcgccaaagccaaatcatccgctaagtttacaattcgacttaccttaacgccaacagctggctggacttcataacgcgtaatagttggtcctaaaatagcttttttaataatcaccttaacgccaaaactcttaaacgttgattgcaaaacttgggtatttttcttaattaaatcacggtcagtactctgatcagtcgatttaattggatcaagtaagcttaaaggtggcatcttataagctttattgactggcgcatcagtttttagttcaccatgatcgacatcggctaattcctgctttaacttttgatcatcttccgcaaaagaatgtgacttaggtagttcctttaccccgtcatcatgttgtggtgcaatttgaatttgcggttctggatcaggtgtggtctctggctcaacttctacgtcttcagccgtcggcgttacatcgtcatcagttggatcggcagggtcaaagtctgctacattaggaaaaatcggtttatcgtcatcaactaaatcttcgtcttgttcctcttttttctgacgccgcttttccaaaacgtcattatatttatctttgacctttaccccagcttctttattctttttgatgaataattgactaactgtctggaatttttcgataattgttctaaatttaacatcaaaaaacatcaaaattccaattggcagcaataaaatagcaaaaacacggacaccgatttgccctagtagtggataaaaaagttgataagctaatgaaccaattaatccaccaccaatgctctcagtgactccagcacgaccaaactccgcggccattgcatgccaaaaagaattcaggaaattactgttaactaattcatgttcaaaatacaagttacattgaattaacagaattcccaaaaaagcgattgctaaccccaagctacgcttaattgttaagtgaatcggttgattatagattaaatttactaggccaaaaagtcccagtaaacctgccgcaaacaaataagaatccccgaagaacattcgaatcaaatttgcgatttgcttacccaaaataccgaaacggacaaaagccagccccgctattaaaatcaagactaaaccacaaatactccaattaagattttgctttttgtttgcttttcgcttattgtagctctttttggcctttctttgtttcttttttgcaggcatgtactcacctgattaattatcgaattcagccttgaagttcaagttaaccggctgacccaaagttaattgggttgtttcatagatcaaggtctcaagttgctcaactaatggtcgagttagtaactgccaatctgaattactaatgtcagagccatcaccatggtaatcttttaattgcacgatttgatgaatcaagccgcttgcttcaaacatagctggtgcaggaattacatcatattgaatagcaacatcatagtaactaccattttcttctgaatgctcatcgtcaccgctaacatctaattttctaattcctggtctaacgtcactaattggtttggtatcttcatcaactaaatcataatgaaatgcctgtacgataatatctgtctgtttttcaaaatccattatttattctcccctagattacgttcatatctttcaggacgatcatagtcatcttttaacttgtcattttcataatgatgggttgtttccatattaggaaaaccttgctggcgtaaagcttctagcaaaaccattgctacagaattagacaagttataacaccgaatgttatcagacattgggatacgtaaattacggtcatagtattcacgcataaaagtttctggcaaaccagttgtttctttaccaaaaacaaagtaataattcttgttaggatcagtataatcgacttgtgcataattttttgatgagaatttagaaattaaatacatctcatcattaggccctaaagtcttcaaaaaggcattcaagtcatcatgtctgcgtacatcgaccttatcccaataatcaagacctgctcgcttcatttttttattatcgatttgaaaaccaagtggttcaatcaaatcaaggacagtgttagtccccgcacaagtacgagcaatattgccagtattagctggcatcaatggttcatacaaaactacatgattagtcattcaaaaaactccttatcaaaaaaagcgtagcttttaagccacgctttaaaactatctagtatttattcgctttcgtcatgatctgcatcccccgtggtcgaagaaacagcattctcttcaaagagtttagactctcttcgataataattgtacacgcgagacacaataatcttcaagatcgcataaattggaataccgaaaactacaccccataagccccagacggcactagcaccaatcaagagtaaaattgttgtaattgggtgcatttccattttattccccattacccatgggctaagaattcttgattcaattgtttgttcaatagcaaaaacaattaagaccttaattaacattgaacctgaagtcataattgaaattacaattacaggaatcattgctaatggtgtaccaaagtatgggattaagttcataaacccagctaaaattgccaaagccacgccatatggtaaaccaattagaatgtaacccaatgagaacatcacacctacccaaaaggcaacagtaatttgaccacggacatatgaagcaacagcatagttaatatcatataataatttgctaaaactaggttgccatttttcaggtgcaaacttggtaatatatggccgcagttgatgaccatcttttaacatgaagaataaaataaacggtgcagttaacaaagtcatagccaccattgtaataatgctgacggcagatgaaatattgccgatagttgcattgatggtactttgtccagacttaaataaggtcttctgcgtattatcaatcatgcctttgatactgcctttaaatgaatgtaaacgcggatcttgcaacgcattttgtgttgcattaaccgcatcattccaaatatgaggccagttctttatcaatgaattaatctgattctgtgcaattggaaccaagatattaataatccaaattaatgcgacaactactagtaagaataaaactataattgtcaccactcgcggaatcttaaattttctttcacaccaatcaacaaccggattcatgatatagtactgaattaccgctaataataatggcggtaaaattgcactaaagaagatccaggcaggattcaatacaaaagatactttattaaagacccaaataattaaaaagaatagcaggacgtttaataaaacaatactaaaacgattatctaagaaccattttttaaaaacagttccacccctatgttggttattttccatctattcatcctaatttttaaatgtgttcataaacaatatcatcatcaaccttaaaattaggtaatggttgatcaatatccggatcaaagtagatcgcattagcaagtggcgtcttagaaacgggacggttaaagaacaaggttgcgtgtcccaatgccttcatgttgctctctaccatcggaccaacatagtttgcaacataggtttgaccatcaacagtgattgtatcgccttttttaaaaacaaaaccactaactggcgtctcagtactgaatttttgaatgacagaaacgtcttccaaatccttattagcaccctcgccaaataaaattaccatgccatctttattatcgacggcctttttaccaatttttttaatatttgcaatccatttcataatataatctctccttaaaaataattttagcataagaaaagctgcttaaaaacttaagcagcccaaaatcggcgattattttttgctcaacaggaaatcgtgtttttaagcgtctaatccgctttcatgctatactttattttagacttatttttatttagagatggaggcccacacatatgaaggttttaatcggaggttacaccaaaaaaacttccaaagggatttatgaattacctattaccagtgcagcaaatgatgcccgtttaggcaaagctgagaatattattagcgttggtggtccaacttatttccgaaaagatggtaatttaatttttactgttaataacgctggcgataaaggtggaatcagcgtctttcaattaagtgatcaaggcgcaaacgaagttgaccactatttaactccaggctcttcgccagcttatgtaggaattaaccgcaccaaaaagttgatttacactgctaactatcatactgctgtcttgtccgttttccgctacaacgacagtggcaagctcgatctagttgatactgtaactcacaaagctgaaacgttgggtccgcgtcctgaacaagttgacggtcctcaccctcacttctttgatgaaaccccagctggtaacttggttagttgtgatctaggcaatgataccgttgatttttatagattagaaaatgatcaattaaaacacattgctcaatataagtgcgaaactggctttggtacacgtcatatcgtcttcagtaaagatggcaattacttctacgttgtcggtgaactttctagtcaaatcaatgtcgttaaatttaacgaagacacttgggactttgaaaatattgctacttataagacaattcccgctgattttactgaccataacggagctgctgccttatatattagtcaagatggcaaatatgtttacacttccaacaggggacataattcaattgctgtcttcaaagttaacgacgatcatactttgagcctggttcaacgtgtatccacttttggtgacttccctcgtgattttaattgggataaagatcagcgctacgtcgttgtcgctaatcaaaatacagataatgctactctttacacaagaaacgctggtactggtagcctaactcctattcaaaaagaaatttccgtaccagaaggcactcgcgttcttttcaccaaatagtaattagcattagtaccaaagtcatggcgcaatagaacgtcatggcttttttattcctacaacttaaagtaaaatagaaataaatgaaacaaaatataagtcatgtggtaataagtcaaatgaaaggcgatgatatttgttctttttgatcataaatttgagtatatgaaactaagccttggtaaaggttgatttttttaatgttaaacttttgtttacttttaaatttagaccaatttttgaaattaagacctcggtgtcctgtacagtttgtcatctttgagcaatttaaagataactcgtactaattttcttgcagttaatgtgcaagcacgtttatgcggcgagtagacagcttcatcatacttcttttggtaatattttttgaaaacaggatcatgtaatcttgctagattggcagcttcaatcaagtaatatcttagatatctgtttccagtcctggccattggagtatgttcgttgctgtgatctcccgattgatattgattccaggttaggccggcatacttagccagctgttcttctttatcaaagcgatcgatacttccgatctcagcgataataccagctgtataggttttgccaataccgggaattgattccagaattttgctttctggtaatgcatcaacgatacgatcaattgctttttctagatctttaatagattcattaaagctttgaatcatgttgtaatgaacagaaagcactgcatcaattgaatcagtcattactttgcctaagcgatatgaacctctaacagctttcttaattgctttagccaaggtatctggatcggaaaagcgtcctctgcctttaacctgtaagtaagaaattaagtcttcggtaggcatatccgcgatctcatccagagttttactatcggttacaatagacatcattgtagcaccgaaaagaggagtattaatcttatctttatcgacagtgattagtttattaacccgataatataaagcttcaatgaagtgctgtttggtacgagtcagttcttgaactaattcatatctggtacgcgttaaacgctctaaagcaagatagttgtcttgtctggcaatgcttactcgataatgtccaaagcttagatacaaagcaatgtaataagcatcgagaggatcagttttactttcttcaaagactttatgaaacctgctggtttctttggggttaattacatcagtctctacattgagcttttgtaaatcttcgtcattttggaaaaagtaagcaggatgaaaactgtaaatagatgtagcttccatgccaataatgatttgatcatagtgtttattttgagctagatctaaaatttgttttttcagttcactagcaccataaagatcattgacaaagctatcgttaattaagcgtttgttttgatcttctgaatcaagtgcaacgacctgtaaatctttagaactaacatcaataccgacaaataatttcattggaaatggcctcctttctttcaaatttctgatcatagattttgatcttcacatgttaacccctaattacagttcttaagttcaatctcgccagtataagtattcactggttgcttctttgaaagctgcacctaatcccaattgctcaaggactagcaaaaagaagcaatcaatacagcatgtgagttagagcataaaggaactgtctgggtggcagacttataaagcagacaaaactgcaggaggtgataacctagaccagttgaccaaagccaatgacaattagaggctaacatgtgaagatcaaaaagcaaatactaatttgattaattatcacaatatgactaattacaatttatataatacgagaaggtgacaaagtgaaaagaaaaataattcgaatattacttttcattcttggcgggatattagggttactacttctgtataaactctatttaaattaccgtcctgaattgaatttattacttcattttgatcaccataatgaagaagtactcgttaacatggtccgtagccatggtattgaagacttagcctttttatttttacttaatgcgatctgtgtagcaattcctggcttatccaacggaatcttttgtgttctcaacggaatcctttatggccctgcctggggatttattgttaattggatcagtgacattttaggccaaataattttaatggaacttttgcaaaaactctatgacatgaaaaagatgtctaacagtaaagtttataagttattgactggattaaaatcaccaatgcttggattaattattggatatatgattccatttattccgagtgcgacagttagctatgtcaacattatgattaataaggagcaacgtaaaaaacagctaataccaatcattatcggtgtcatccccttcgcttacttatatgcttatggtggcgattcaatcttgcacttagacggaacacgattgattaaagttgtaatctcattcgttgtcattgctttaattgcagtagctattttgcttagtctgagagcaatcaaaaagcgtacaaaaaaagcttgaatttactcaagcttttttattatgcctagcatatttaaactaagttagcttcttctaacagttcttcgacccaagttctcttgattttcttcatccctgttttgagagctaacttctcaggtaatggcatctcttgatcaactaatttcttcttgtcagacatgtagtacatcgcacgaagcaattgacgaatatcataaattgagtcaaatacttcaggtacaccacggtcaacgttaagcaatgtataaacagcttccatggcagttctgacagaatattcggtggtaaagacagtgtctctagttggtgattcggcaaaattgccaataaaggcaatattaactgatccttctggaacaacatctggacggtccccatcatgacgaggcataaagtaactagtgatatatggcatgtaaactggtacggtattcatattttcttcactagccaattcgctgatttgactctctggcacgcctaagtgatagagcatttcctcggcaatttctttaccagtacagtcaacgactctcttcttgatgtaattaccctcagtatcagaatacaaagcataaatccaaacaacgatttgatctggattctggctcttaaagtgaggttgacggtgaatagtaaagctaagttcccaattagagtcaacaacagtgataattccaccagtattaactttaccatcgtaaaggctgcgcttagtcaagcgttcaaagtatggagctattttcttattttccaaggtagctgtagctgatacgaaccaactacgctctggcaagttttcacagaagacatctggatgaccaaagtcaggatcttgtttagccaaattttcccataatttccatgaagagcccttgtcgtgagtaattggtgctggggtattttgatcaccataagtagaactttcagtgattgaaccgttagtcacaaagacaatatcatctggggttaaatcaatatcactttgctcaccattcttggtcatcacgatcttcttggcaaccttttgcttgccctcatgatcaacaaccacgttatcaacgtgacaatcatattcaaattgaacaccgtgatcttttaaatatgccaaaagtggcttaaccatggactcatattggttatacttgttaaacttcaatgcggtaaagtcaggcaaaccatcaatatggtgaataaagcgcattgcataacgccgcatttcggctgctgagtgccatttttcaaaggcaaacattgttgcccagtatgtccagaaattagtcttaaagaagtcatcactgaagaattcttcaattgtttcaccttggagttccttttccggtgtcatgattaacttcacgatttcattagtgcacttacctagaccatattgaccatcacttggtaagcgatcaccgcgattataaattagacggcaattggatgagttaggatcttctttatcaagccaataatattcatctaagtatgatgcgccagggatttccaaacttggaatcgatctgtacatatcccacaaacattcaaagtggttctccatttcgcggccgccccgaaccacgaaacctgcattaggacgcttagcaccatcaagtgaaccaccagctacgggtagctcttctaaaatatgaatattttcacccttcatttgtgcatcacgaactaaaaagacagctgcagaaagaccggctaaaccactaccaataatataagcagattttttatctacgcctgcgggctttttggcatccgcaaaagcctcataattaccattggaatagtacataaagatatcctcttttctgtataagtatagtttttaacattacactttaattataaagaaagcggttactagatgcgagttttttagaagttttagctaataactttagaattctttattaattagtttctgccacagttcttgcatatcttttggatcattcaactcaattgttttacatttttgctggctaaatggatccggaaaatttaaataaaagcaatttaaggcttggcgtgaaaacccatcttgaattccatataaaggatcaccatataaggggtgtcccagataagccatgtgaacacggatctgatgggttctaccggtaagcaagcgtaactctaccaagctagcacctgtaacctgatctaggactcgatacgcggtttgagcgtcctttccatctgccactactgcacgtttaactccactaccctttttgccaatcggttgatcaattaaaccagttaactcattcggagcaaaattgccatgtacaattgcatgatattttttgacaaatttctccttgccaattttactaaaacgagcatgggaaattgcatttttccccaccaatactaaaccagatgtatctcgatctaatctagtaataacatgcggcttcaaatttttctgtcctttttgggcaaaataacccaacaatcgattgaccaccgcatcatcatcttcatagcgtgagggaattgacaacacacctgcaggtttgttaactacaagataatttttattctccaacacaattgatactggattattcgatggctttaaaaaatcatttttcttttcttcaccactgataaaaatcacttcatccccagcacgcaaattaaagctagtatatcttcttttatgatttactaaaatcatgccatgatggtgtttagcattgtttaacgcttgatgcgaaaaaccattttttaacaaaaaaggacccagctttttggggtctctttcttgcacaattagtttaaataaactagtcatttttttcattatctccaataaacgcattttgtacgcgtgaccaaaaatgatggtggccaaattgatcaaactgaatcgaatgccgcgaaattcgatattcaatcttcttagcattacgtacatcaattcttgctccatcaactgtcatcacaaaatgatctgcattaggaacaatcgaaatccattgatcaggcgcaatcacaattggtgatgacaaagttctaaaaactcgattattaattgaggcaatttcagtcatttgcaacgcttttagccggggatgaattactgcaccacctagtgatttgccataagcagtcgaacctgttggtgttgaaacgcaaagaccatcgcctcgaaagttttcaaataattgatcattaatgtacacatcggcctctaatgtatgtgaaactcttttaaccgctgattcattgacggctaaatggtaatgagtttcacctgattcagtgagcatctttatttctagtaaaggatacttcgctggttcacccttggttactgctaaagcatcaaccattttttcaatatcatagttacgccaatcagtataaaaacctaagtggccagtatgaatcccaataaagcgcacagaatctacttgattttcatagcggtggaaggcattgatgagggtgccatcaccgccaacagtgatcactacatcaggatatctagcatcaaagataaaacctttttcctgaagcagcttcttaagctgcgcaactgtctttaatgtttcatcatagttattatgcgctattgttactttcataatttttctttgcccttatttttggtaaaaattttctgagcttcttggacctcatccttaattgacgacatttcttcgtctagtctataagcggcttcagccgttgattttaatctagctgaaatgtcatcaggatagacaccttgatatttgtaatttaaagtatgttcgacagtagcccaaaagttcattgccatagttctaatctgaacttccgcaattaattttttcggaccttctggtaagtaaaccgtatagttaatcaccatgtggtatgaccgatatccactcggcttagcattttgaatataatcacgctcctcaacaacttccatatcatctcgagcatgaatcaaatctactaccttataaatatcgtctacaaattgagtaacaatcctaatccctgcaatatcttgcatatcagtctcaatgacatcaggactaattactcgccgtttcattttttccttgatagaatcaactgtctttacccggccaattacaaattcaataggtgaatgttctcccttagttaaaaagccttgtctaagggaacgaaatttaacctttaactcgcgaacagcttcgttataaggccacaagaagttatcccaatctaattccatgagaaaacattcctttcttaagcaaacaaactcattttaccatataattaagttaaacagttcggaggaaaaacagatgagtaaaaatcgagaaattgaagcaaaaactcttttaaataaaagcgtttatgatcagatcactgccgcttttccaatcaaaagtgactttacccaagaaaattattattttgatacagcagatgatttattaaaaaatcatcaaattagcttgcgtattcgaatctatgctactcacgcagagcaaacaatgaaggtaccggatcctaatcctgtacaaaagaatttccatgaagtaattgaaattaatgatgaattaactcacgctcaagctaaaaaattagtagcaaaaaagcattttaaattcactggtaatattggcgcatatctagataatcattttgccaatgaccaaaaaaagctacatcttttcacctggagcaaaacccgcagaattttgatgaacgggccacaaaactgtgaattaactctagatgctacgtcttatccagataactatcaagattttgaattagaaatcgaaaatactaatcctgctttaattcaaacagtattaactaaacttgaacaagaatatgactttgaacaaacggctgctaacactaatcaaagcaaaatagctcgtgcaagcgctcaccaaaaatagtatatagaaaataaggcatattttttgtcacttattttttttcttgctaaagtaactaatagtaaatcaccaaagaggtcgagattatgtttgagatttttctattcatcaatccaatagggatttattgttatgacactgaaaaacagattcgtaaaaccgttgatgaattaggggtcgacgtttgttatcactatattcccattgcaaatgtttgtttaatcaatgatgatgcgattcgccgacgcaaagatgaccagaagttgcctgatattagtaatttttctagagcaacttatgaagcattagaaaattaccacgcgattaggctggcctatggcaacaaaaaagcccgtcaatacctgtatgaattacaaaaaaacttgagcaaagatgcttcagcttatacacctgagctgcttaagcggatcgcaaacaaattacatatcaaggatgcggatattcaggcaatcaaacaaactgattacctgcgtacttctattgaagaagatcaaaaactagccaaccaatggaatattaaagctactcctaccaccgttatctttaacgaagacaacgagcaaaatggagtattgctagagggaccaatcaatcaacaggatttagttaatctaatgcttccagattgtcaaaagtgtttttcagactatttacctgcggagcatcatttacgccttatctaaaggcgttttatttttgcaaaaaatcactaacccgatctctttcacctgggttacgccaagtagcaaaaactttatcaggtaaatcatcaagagttaatttgcgttcataaagcatctctcctattttcaatcctaacttttttttttgcataatttgctggcgtaaatattttctttgagttgcaatgttcaaagaatattcttttttgaatggcttaaagcgccaaaaatcttttatccccaattcatcaaggacaaatgatttactttgataaaccaatttattagctaccggttcttcgaaaacattatattttaagcaaaaacgatttctctgtggattaatttctaaatagtaattcccccaagctttattttgtcgaaagaaaatcaactgtgtgcgtttcaatcgccgtttcaaatagtgtcgctgtcccacaatccaaatatcttttacaccaattttttgataaagctgatgccaatggttaaattcttgttgactcaacggcgcacattgaacttcaaacgctaacttagcagttgctaagacatctgcacgcaattgtccttcagctaatggaatctcaacttctgccggaaaaccagctgccgtcaaagctgacttcaacagcattttcgattggtgatgctcctctttttcacccattaagttactgtacttcacaagatgcttaaaaaaggctgctttttgctccgacataaccaaaattacttttttattgcaatgtggacagtgataattatcacgattcaatttcttttgccttgcattaactaaacatgcttcgtcaactgcaaggactaatttcttatttaacatggctgcatacatttttctcacccatgttttattacgtaaaaaagagacggaattttgtcccgtctctttttctttaaagaatcttaataattagctgcttttaaaaagtaatgtcgaatctggcctaaagcattttgcatcaataagcatttgcctgtttcttcaactacacgcatcttatcactatcgaccttaaaaccaaattcgttggctattgtccacgcatctgctggtttaagctcctcatattcttcatcaagaaatgccaaatttaagaaatattgtccatgcaagtaatacaagctagaagctaaatcatttgccttaaggttatcagctaattcaattagactacctaaatcatcaaaatagtaagcctgagtcttgcgcgatctccaatcagttggctcattgtttttatcatcttggttaaaaaagttgtgagtagctggtccttgaggagccgaatttgaattcgtactctcctcatctaaatcaaagaaactttttgaatcatccgaattcgttgatgattgctcatccttaggaaagctatcacccattagtttccttaaattctgtgcatcgtccggcttaactttggtgatcatcaaatctaatcccccattattaggcattacttgaaatgatactggatcaccattggcaaattcatggtcttcatcgacctcatcaagaattttatagaagaagtcttgaatcttttgtctattacctaataaatcaagcattcccatcccacgacgagccaattcagctttatcaattcgaactctgatagtattcttatcaatatgatctacctgcacaggatctcacctccatgaattaatatatctattgtagcgtatttttcgtttaaaataaaagtgttagtctcaacaaaagccttaactaacacttttcaatcattttataaatctgcaatcttttgtgcttcagccaattccaaccgacgaacttttcgtggcaagaatcgacgaatttcatcttcattgtaaccaacttgaagtcgacgatcatccataatgattggtcttcttaacaagctaggattcttttctactaaatcaagtaactgatcaattgataaatcgtctaaattgattcgcaattgttgaaaagctcttgagcgggtagaaatgatttcctcagtaccattttcagtcatccgcaagatctttaataattcttttttagtcaatggttcagaaaaaatgtttctttccttgaatggaatattatgtttttcaagccacgctcttgccttgcgacatgaagtacaactaggagagacatataaatctaccataaaaatcacgctcctcagaacaaatatttgtatacgtttctttactcatagctagtataccatataagcttctttttcgtaagtgcttaatttatcgtttacctctgctatttacttaatactaaagataaaacgtgaattatttgtgaagatttcgttcgttttgtttaaaattattaaaaataaaaaaagagacatcacagtctctttttgcaaattaaaactacttgttcaattttttcattaaattattaactaatttttcgttgtcttcagcagtttctgatacataacaagcttcgttagctaattctttaatgtcagcagtgttcaatttcttcattaagcttctgatacgcaaaattgaagttgcactcattgagtattcatcaagtcccattgaaagtaagattgggaacatagtgttatcaccagcagcttcaccacacataccacaccaaataccgttttcatgagcaccatcaatagtgtgcttaatcaaacgaagtactgatgggttatatggttggtacaagtatgacacattatcattaccacggtcagcagccatagtatattgaattaagtcattagtaccaattgagaagaagtcaacttcctttgcaaattgatcagctaaaacggctgcagcaggtacttcaatcatcataccgacttgcaagtcatcaccaatcttaacgccttctttagcgagcttatctttttcttcagctaaaatttgcttagcttcacgtaattctgctaaagtaccgatcattgggaacataattcctaatggaccgtatgcagatgcacgaagtaaagctcttaattgagttctaaagatatccttgtattgcatagaaagacggatagcacgaacacctaagaatgggttcatttcttctggaagatcccagtaatcaaggtgcttgtcaccaccgatatcacaggttctgataatggtttgcttaccattcataccttcaataacttccttgtaggcatcaaattgagcttcttcagttggaaagtcactagagtccatgtacaagaactctgttctgtacaaaccaatggcttccgcaccattatcctttacacctggcatatcattaggtgtaccaatgttagcagcaatgataaatttcttaccatctgcagtaactgatggttcattcttaagcttagcccattctgccttttgcttaatgaatgcttcactcttttgcttgtaatcagctacttgagcgtcacttggatcaataattgcatccccgtcaagaccatcagcaattaacatatcgccgttcttaacatccttagtaattgagtcagtaccaacaacagctggcaattcaagtgaacgagccataatagctgagtgagctgtacgaccaccaatatcagtaacaaaacccttaacatactttttgttaagttgagcagtgtcacttggagttaagtcgtgagctacaacaattacttcatgatcgattgaagcaggatttggtaattccttaccaagaaggtgagccataatacgctttgaaacatcacgtacgtcagcagcacgttcttgcatgtaaggattatctgtcatcccttcaaaaatagcaataaacttcttagcagtctcatcaagagcagcttctgcgttgatctttgaatccttaatttcattctcaatggcaccagtaaattctgggtcatttaaaatcattaagtgtgcttcaaaaacttgagcttcttcatcgcccaagctttctttagcaatatcatgaatcttttcaacttcagcagttgaagtcttaattgcatcgttgtaacgagctacttcagcttcaacatcagcaattgaagatttagagaatgaaagatcaggctccacaagaagatatgctggagcaatagcgataccatcacttgcagcaattccttttaaagtcttggtcattattcagctaaaccttcttttttcatagtgtcggcaattgcgtccaatgcgtccttttcgtcatcaccttcagcagtgatagtaacatcagcattttgaccaacaccaagtgacataacacccatgattgacttcaagtttactgacttaccgttgtattccaagttaacatctgagccaaactttgaagcagcttgtactaaaagagtagctggacgtgcatgaatacctgtttctgcaatgatatgaaaatcgcgtttttccattataaatatctcctttaaattgaaaaattaaactggtaataaatacccattcgagtattagattatcatgtttttacagattagacaactgcaatgtaacagtttacattatttattcatcggtattcgtagcggtatacacaatcgcgccgcctctttctgccctaccggtaatatattgtctttttccataatttctaatagtcttttgaagatcaaacgcatcttttggctcaactttatactcttttatctcgcctgagactaattgatctagaattttctgataatccaaaaatatcaccactcttttaaaattttataatttttccactattaattctactcgtattatataaattaaatcgtattatataaattaaatcagtgataatgattattcttttagtttgtttattcgatcatcagatgctagtctctaattgtcattgaccttggtcaattggtataggttgtttccttctgtagctttgactacttttttagtctgccgcccaagcagttttactaatgacttactcacatgctgtatcgattctggctattactgattcagagcagattcagtcgcagctttttagcttgaacctatgaatacttatattttgcgagattgtcttagaatctgtaattagggactaacatgtgatgatcgatctatgaccaaatatttgctagaaaggaggccattctcaatgaaactttttatcggaattgacgttagttcaaaagatcttcaagtcgctattactgactcagaaaattatcaaaaacctttacttaaccaatctttttctaatgacctgattggtgctaatgaggtcaaaaagataattcttcaacttgctaaacagaacagctatgacaaagtaattatcggcatggaagccacttcaatctatagctttcaccctgcttatttctttgccaatgacgaagatttacaaaaaattaatcttgaaactgatgtcattaatcctaaaaacactaaacgatttcatgacgtttacgaagaaaataagaatgatcctactgatgcctattacatcgctgaatacttacgctttggtaaataccatgtcactattgctcggcaagaggaatacttagctttacagcgtttaactagagctagatatgaaatcacatcttcgctcactagagctaagcagcacttcattgaaactctttattatcgtgtaaacaaactagttaccgttgacaaagacaatattaaaacttctatctttggcgcaacgatgctgtcaattgttactgatagtaaaaccatcgatgaaatcgctgaaatgccaatcgaggatctaattgactaccttcaaaccaaaggacgtggccgcttctctgatccagagactttagctaaagcgatcagaaaagccgttagaggatcatatcgcttaggtaaagtcatgaaagactcgattgatgccgtattatctgtttactatgccgaaattaaaactaatcagaaattgattaagaacttagataaagcaattacagatatcgtccaaacgcttcctgaagagagaatactacaatctattccaggaattgggtcagtttattccgctggtattatcgctgaaatcggcagtattgaccgctttgacactgaagcacagctagctaaatacgctggtctagcttggcgtcaaaagcaatctagtaattttgatagcgaacacaaaccgatgactaaaaacggaaatcattatctaagatattatttggttgaagctgccaacctgattagacaaagagatcccgtttttcggaagtactatcaaaagaaatacgatgaagctttctattctccgcataaacgcgcttgcgttctttgtgcaagaaaattaaccaggaccattttcactctgctcaaaaatggtcaaatctatcaaacaccgaggtgattaattggtctaaaacatttttggaggagtaaataatagttgttaaaaaatcccttgaaatagggcttagtttcatgcacgcaaattttggttttaaaacaaactaattaaaaataaaatttaacttttacattgacttattaccacatgactatttatattcaattttcaaaaatattaatattttgtttgcggtaacaaaagtatttcttataaaaaataagtgtttgagtcttagcacttgactaccaagagtgctaataatataattttggtacagttgaaaagaaaggcggtactatattttgctttgccaaaattgtcatgagcggcccgcttctattcaccttttcactaaggttaatggccaaagccgcgaaatagatttatgtcaacactgttatcaagaattaaaaaatcaacaaggaaatcaaggaaaaatgaataataatgaattttttggcgactttgatgatttattcaacgcattaaacggaaataacaacaatgccgcaaacaataataatgaaatgagaaataacgaccctagaatgcaaatggggggaggcgctggtaatggtggtcaaaacggcagaagcctacttgaccaatacggaacagacttaactgcccttgctaaaaaaggcaaaattgacccagtaatcggtcgtgataaagagattgctcgggttatcgaaattttaaatagaagaactaagaacaaccctgttttaatcggtgaagcaggtgttggtaagactgccgttgtcgaaggcttagctcaagaaatcgtagatggatcagtaccagcaaaattgcagaacaaacgaattatttcattaaatgttgtttcacttgttcaaggtaccggtattcgtggtcaatttgaacaaagaatggaacaattaattaaagaattacaacaaaacgacgatatcattctttttattgatgaaattcacgaaatcgttggtgccggtaatgctgaaggtggcatggatgccggtaacattattaagccagctttggctcgtggcgaattgcaattagttggtgctactaccatcaaagaataccgcgatattgaaaaagactctgctttagctagacgttttcaaccagttgaagttaaagaaccttcaattgacgaaacaattcgcatcttaaaaggtattcaaaaacgctacgaagactatcaccatgttcactacactgatgaagccattgaagctgccgcaaaactttcagcacgttatattcaagatagatttttaccagacaaggctattgaccttcttgatgaagcaggttctagaatgaacttaaccattccttatattgataaggataaaatgcaagaaagaattaatgccgcagagcaattgaaggaagaagccttaaaaaacgaagattacgaaaaagcagcctactaccgtgatcaaattgaaaaatatgaaaaggttaaagatcaaaaggtagatcctgacaagtcccctgttattactgataagatcatggacaagatcgtagaagaaaaaacaggcattcctgttggtgatattcaaaagcaagaagaaaaccaactgcaaaatctagctgctgatttaaaggctcacgttatcggccaagacaaggctgttgaaaaagtagctcgtgccattcgtcgtaaccgaatcggtttcaacaagtcaggccgtccaattggttcattcctcttcgttggtccaactggtgtcggtaaaactgagttagctaagcaactggctaagcaaatgtttggctcagaagatgcaatgattcgtttcgatatgtctgaatacatggaacaatactcagtttccaaattaattggttctgctccaggttacgtaggctacgaagaagctggtcaattaactgaacaagttagacacaacccatatagtttgatcttgcttgatgaaattgaaaaagctcacccagatgttttgaacctcttcttgcaaattcttgacgatggtcgtttaactgactcacaaggtagaacagtttcattcaaggataccatcattattatgacttctaatgcaggacaaggcattaagaacgctagcgttggctttacagcagaaaacgaagatgaagctaatgaatctgctagaaataatatgagccaattctttaagccagaatttttgaaccgtcttgatgatgtaatcgaatttaatgaattgactaagccagacttgcttaagattgttgacttaatgttgcaaaataccaacaatatggttaaggatcaaggcctacacattgatgtaactgctgctgcaaaagataaattagttgaagatggctttaatcctgccttaggtgctcgtcctcttcgtcgtaccatccaagaagagattgaggataatgtggctgatttcaaacttgatcatgcacaggctaagaatttaaaagccgatgttgttgatggtaaaattgtaatcagtgatgaagcaaataatgaataggatttaataaaagacaaagtccaagttataccaaaagatttcgaagcaatattcgaaatcttttttcttaaaaataaaaatatgctactcaatttgaggtatactaaattagaagaagtaaagctaacagaaacaggtgaattccatgcatttaattgatgtaaccaataattactctgatttggttcacagtcagctcaacactaccgatgcaaactatgttaaagtttattctcttggtaatacttcagttatttatactgaaagtaaggattctatcggtattgcacttgaaaaccatgaccgtcgtgttcgcgaagatgagattgaattcgtaatcaagcgtttaattaaagattatgattcttcatacactttgactgtagacaagagtcgtcatgtaatcgaaattcacgttgacaagtaatccaaatattgttgtatcaaaaaaggaggattgattcattcaattctcctttttctttttgctttaaagtttttctgttaattcaacatctggatatttgtcatggaagaaacgttccgcaaattcattttcaaataagaataatggattaccataacggtccttaactaataagttacgagtattagacatgcgtgggtcaagctgttccggatcaatccagcgcgcaacacgatgaccaatactgttcatttcaacttcagaattatattcattcttcattctgaattggaacacttcaaactgcaattgaccaacagcaccaagaatatactcatccgtttgataattgcggtaaagctgaattgcaccttcttggactagctggttcatccccttatggaatgatttttgcttcatcacgttcttagcagttactcgcataaataattcaggtgtaaattctggtaatggtggataaacaatcttgcgcttaccagcataaatactgtcaccaatttgaaaattaccagtatcgtataagccaactatatcgccagctaccgcatcagaaacttgtactcgctcgcttgacatgaattcagtcgcattatttaaacgaattggcttatcagttctagctaaagttacgtccaagcctttcttgaattcaccagaaccgactctaacaaaggcgattcggtcacggtgatgaggattcatattagcctgaatcttgaagacaaagcctgaaaattctggatcttctggacttagctcctcatccccattaactgtgtgactctctggtgctggagccaaatcaacaaagctgttcaagaatgtctcaaccccaaaattggtcaaagctgagccaaagaagacaggagtttgatcacccatagcaatcttctcgcggtcaaacttgttcccagcttctttaatcaaatcaatttcatccagagtatcctggaattgaggatcttgactaagtggctcactatcaggcaacttaccatcttgatctaatggtaaaaagcgatcttgatcatttttgcggtaaagctcaacacgattattagcgatgtcatatagaccctttaaagtttgacctgaaccaattggccagtccattgctacaccctcgataccaagcaaatcttccaattccgcaattaaatctaatggtggacgtccatcacgatcaagcttgttcataaacgtgaaaattggaataccacgttgcttaacaaccttaaacaacttctttgtctgtggctcgatacctttagcagagtcaattaccatgacagctgagtcaacggccattaatgtacggtaagtatcttctgagaagtcctggtgtcctggcgtatccaaaatattgatacgtttgccttgatattcaaactgcataaccgaactagtaacagaaatcccacgcttcttttcgatttccatccagtcactagtagcaaaattgccagttttacgtgccttaaccgtacctgctttacgaattaccccaccaaacaaaagcatttgttcagtaatcgttgtcttacctgcatcggggtgagaaataattgcaaatgttcttctcttttttactttatctgctaactctttgtccattagtcctcgctatcttcttccttttttgattcatcaatcgttaataataccgtcaacaagcgtgaccccttcatccttctagtggtcaaagtcatcccatcaccaatatcaactgttaacttttctcccttagctggaatcacttttaaagtattgatcacatagcctgctatcgtatcaacatcttccatttgaagattagtaccaaattgctcattaaaatcatctaatggcatcttaccgtaaataatgtacttatttgtagctatttgattaaaaagaatctcagtgtgatcaacctcatcatcaatatcgcccacaatctcttcaaccaaatcttcaattgtagctaatccagttacaccgccatattcatctgtcaaaattgctaattgtcgttgcgtttgctgcatttccatcaacaaatcgcccagctcggcagtttctggtgcaaacagcggctcagtcatgacatctttatagtcaagattatcaaaacccttttgtttagcctttcgtaaaaccgttctgatatgaataatccctacaatcttatccttatcacgttgataaacgggaattctagaatatggctcacgaaggatttcatctagattgtcttgaaaactgacttctcgatcaaccatgaaagcatccgttctaggtaccattacttcacgggctgtcttaccctgaaagtccaaaataccttctagcattgaaaattctgtatcatcaattttatgactttcatgtaaagtaacaatttctttttctaaatgatctttagtccccacttttttatcgccggataatctattttttaagcgaccaaacagagttcccgctccaggatcactattcattttcgtactctctttcttaaaaaagttatctaaatatagctattatagcatagagccaataacaattatgttaaaatagcacataagactaggaggttcgtcatgaaaaaaagtcatgtcttactcgtttttacatttcttttgctaattccctatatctgtagcttagctattattggaatcggctataatgcattagttttacattcagctgaactttatcgcacattaatcggctcattagttggcgcaatcattatgtttgctgtcaaggctactattcaacggcctgttgatttattagctgttcaaaccaacgatggcttactgaagcagcttttacgtttcttcagtatcagacggcgctactggcttttagcagctaatattatcttagactttgttctttgctttgctgctacctacataatacgtgctcttttaacacttgatcaaatcgtaggcggctccatcggctttgttttgttaatcatgtttgtttcaacttgtcttggcgcttatgttgaatacgataacctgtcaatcgaccctgagcagcattaattacttgctggccttcaagtacattacttgggccagtttttttgtatccatgtcaagatcccaagtaatatatggcgtgtcactgtcacccaaattttcatgtacttcaattccgctagcaactacttttttggcaaaatttggcacggtactagtcaacggtaagttgaaaaagactaaagtttgattctcttctacttcctccgctacctctgcagctggtaattcaaacttcattaaacccgttggcacttcatcttttgctacatctgctaaaacgccataccaatacataaagctgtcctcacctgataccactaggacagaacgcttattttctaaattatgatcagctaaaaatttttgaaaagtttcatcattttccatttgctgattagcttccataaagctcttttgagcattcatcaaaccagctggaaatggacgaccaataaataatcttgattcaatatttttcttcattttttctcctaatattctactaattcgtctaaatcaattatttcaccgtttaaaaaggcatcaatctcacctgatgaaaaaccgtgactaaacaaatatttttttattttaaaattgcgttcaatttctggaagatttctaaaacgcttgtaagccttaattccttgtttcttcaaagcttctgtttgtgcattctcatcttctttaagatccattgcatcaataataacgttactaatcccgctatcaaagccatgcgttaataatttagtacgcatcttacgctctaattcacgttgtgaaatcttgccaacttgatggctcatcgacttaatcacgcgttggcccacttcgagccaatcttcttcatcaatttcatctaacttatcctgactaatttcaggatcaacgcctttttgcgtcaactttcgtaataaaattttagggccatcagagccaacacgcaaatcatttttgataaacagcttggcatattgacgatcatcaagatagcctaattcattcaattgactaacagcactattggctgcttcatcagagatttcgtgtttttttaaatattgcagcacctcaaagatggtccgaggctcgtaactcaaaaaatgagccgctaaatcactagccttagcatcagcatcaaattgcctaatcttttcaacctgctcatcatttaattctttacctttaagcagcacaaattctgccaacgttttctctccggcagaaaaagcatattttccatcaataaaaacattatagcgacctggccgtttttgtgcacttactttggttatgatcaacttgtttcacctcgcatatttttctacatccatgctagcaaattttgctaaagcttgctaagaactttttccaggtagtacaattaattgaacacaatttagtttttagtagaaagaattaacgatgaacagaaaatttacccataataaaccaaaacatgaaaaagacgtcatcatcactattaaacgtttaggaattaatggtgaaggaattggttactacaagaaaaagattatcttcattcctggtgccttgccagacgaagtagtagttgccaagattgttaaatcatatccacactacatccaaggcgaactggttagaattaaagaaaaaagtccagatcgcgtagacttccctgaaggtgttgatcccgagattggtggcttagaattagtgcacttgtcttacgacaaacaacttgaattcaagaagaacaatatgcttgaatcattacgcaagtaccatcctcgtaattacaataagtataaagttaaaaatactatcgctgctcctgacccatggcattatcgcaacaaggctcaatatcaaattgaaaaagatcatggtcaacttaagcttggactttttgctccaaattcccaccgcttgattgacttaccaaagatgccaactcaaagtgaagatacacaaaaaacggaacgtaaaatcaaggttttaattgaaaaattgcatgttcctgttgccaactatcgtcgtcatttacctggcattaagaccgtagttgtccgtcaatcagaagcaactaaggaaatccaggtaaccttgatttcgatcggccacaagattaagaacttaatccctcttgctaaagaaattatgaaacttggtcatgtagtttctgtctatcagaatgaaaccgaatggcagaatccacaagtttggggaaataaaaccgaaaagcttttgggcaagaatcaaatcaccgaagaaatcttaggtaaaaaattcgccttatcaccacgtgccttcttccaattgaacccagttcaaaccatcaatctttactcagaagcattgaaatacttagacctaacccccgatcaaaccttgattgatgcctatagtggtgttggtaccttaggtattttggcagctgaccgcgttaagcaagttgttggaatcgaaaccattccagaggcagtcaaagacgcacaacataatgtcgagcttaaccacatcaaaaacgctgattatattcaaggcagtgttgaaaaggttttgccagaattacaaaatagtggtgttgcaatcaatgctttaatcgtagacccaccaagaatgggcttagctaaaagcttgatcaaaaccctcttgcgggttaaacctgaaacttttgtctacatctcatgtaatccctcaaccttagctcaagacttagttttacttagcgaggcatatgatgttcgggtcatccaaaatgtagacatgttaccacaaaccccacgctgtgaggcaattgctaagttagtgctcagaaaagatagataaatccaacaacctagtcttgggctaggttgtttttgtatataaaaaagcggctactggacaatcctgtcccttagtagccgcaatttcaagtggatgaggtagctcatcaattgatagtcacgatttttagttgtttggtatgtatttaaacaatggcattatcgcaaccaatattaacattcacttgttcgggtctttacataaaatgtaacttttaataaattggagtttttgcgaacagccaatgataattaatcaaataatttttaattaagctatttatggctgacacctctacgtatagagaatctttcaagtttccaataataatacaattctggagataaaaacttacttatatttttttatagttgttaacttttatttctacctcttccacactattcattatatctagttgtgaaaccgtttacaagaactaacccatatatttttgcaaaaatctttctacttgttgtcgatattgctttggatacattggataagacaaagcatgccctgcaagtggcgcaagccaaatttgcttttgagcagctgttgccgcataattttgccagaccatcttagttggcacaaagtgatccttgccgccatgaataaataaaaatggtcgcgtatttttatttaactgagcaaccgcagaagcatcttttaaataaaagccatttttcactctattaattccactaaccaaatcaactattggaaaccgtggaaaagccttcatatgaaataaattttgagcttgatagttaatttcacctttcacggttgaataaccacaatcttcaataaaagctttcacttgtggtggcaaaagcataccgcttaccatcattgccgttgcaccacccatgctttgacccataattacaattttggcatttgtaccagtttgatcaattacttgatagatccaacgcaaaatatcatctttttcagcccagccatagccgatatacttaccttcgctgcgcccttgggcacgtgcgtctggaacgagaacattataaccaaaatcataaaacattttggcaaaaccagccatactatctccatcactcataaagccatgtaataaaattgcggttttttggcatgtttatcaaggtactgggcgaacaaagttatgccgctatcagtttttaaagtccatgttttcttagaaaaatctctaaaccaaaccttatcacgataaagtggatccttgcctgataattctttggagtcagcttttttattaaacggtgtcatcgccatcttgaaaaagtactcgcttgccgcaaacaagccagctccagcaattaatgcggaagacaataatagtttctttttcatcttttaacacttccaaattcaattatttcacttttcattttataattaaattgctgaaaatttacaatccttatgacttaattatactgaaaaatgcgcttaacagacttgcttcaattaatcgatgacctgaacctgaatactaaattttatctaaagcatgatgacaaactacttaagtggggaaaactcactattgccgaaggaaaatgtctgctgctacccgggcaaacagcaatgaccaaacaaaaattgattaaattagttggccgcatgcgtggtcgcggcatccccttgttaatggtcattgaccaaaaagaatattccattttcggcctacagattcgcgaagatactggacaagcaattttaatgtaaaaagtgtctgggaaaaaactaagtctcagatcatgaaaaaagaacgttgaatttttgtttcaacgctctttttgtatacttttagctccagccttgatattattaaatcatcacaaaataaaaaaggtggaaactaacatgtacaagaattatatcacaggtcaaactgctttaacacttaatctagattttgccattccggccaatcatttggctaatgtcatcagctggtttgtagattcaattccagaagatgttttagtaggcaagactgctaaaacgggccgcccagcctatcatccagccatgatgctcaaaatactgctttttgcttactccagaagagttttttctggcagaaagattgagttgatgctggaagaaaatctgccaatgatgatcttggctgaccagcaaaagatttcatatcatactatcaataattttagatcaagcagccatgccaatgaactgattaaaaagagctttatctacttcactaacctgttagaagatgaaggcttaatcaatgaaggtgctgcttttatcgatggtactaagattgaagctgatgctaaccgctatacatttgtctggcgcaaagcggttgaaaagtatcatgaaaagctgaaaggccaggcagttgaactttatgatgaattgattactaaagaagtagtcaaagaaatggaaaaagaaaaagttcaaactagtcaggggctaaaggaattagctcaagaaactgaagcagaaattaacaagctgactaaagagattgagcaggaaaacaaagccattcctggcggttcacctcgaaaagccaagcgacgtggactaaaaaagattctgcaccggctaagaaaagattatgtgccaagaatgcaaaaatatgaagaagccgaagagatctttgccggacgcaacagttattccaaaacagatcatgacgccacctttatgcatatgaaggaagaccacatgaaaaatggtcaattaaagcctggctacaatattcaagcagtcacgaccgatcaatatgtagttgattatgccatctttcctaatccgacagatttcaaaactttggagccggttttggatcaaatgaccgtgttggacaagtttgacaaaatcgtcgccgatgctggctatggcagtgaatacaattattcgatgctggaggaaaaatatccagacaagaagtactttattccctacactatgtatgaaaaagaacagaccaaaaagtataagaatgatccaactaagctaatcaactggtactacaatgaaaaagatgattattacattgatcatcatggcgtcagattcaatttcaaatattacagccagcgcaaggatcgttctactggtcaggtccgtgattttaaggtttatgaggcagacgagttccagctaacgccagaattggaacaattggctaaaacagctagcggccgccagcgccaagttcgctataatcctaactggcaatatttaaaagaaaaagcaaaagaagttctccaaagcgaagaaggcagacacatctatggcatgagaaaatatgatgtagagccagttttcggacatttgaagaacgtatttggcatgcgcagaacgcacctgcgaggtaaagagaaggtcgaaaccgatatcggaattgcctttatgatgatgaatttgaacaaatattgtcaaagaaggtggctgaagggccgatttttattgttaaaaattttaaagagaacaaaaaaacgatcaagattcttaaaaaaggaaatcttgatcgtttttattcatctggaagctagttttttcccagacactttcttattcttttacgcggtattgacgaatatgatccttagtaccagcaaaataccaagtacctacttcatcgtcgctagttaattctaagccatcctcaggatctaacaaagccgtattgaagacgtcttcatattgcttaactgtcagcttcttccgccgatcaagcattgcttgatcagctgtaggatcaacttgtttttcatatccttcaaccaacttgccactataaaactcagccattgcacctgaaccatatgaaaacaggccaattaatgagccagcaggtaattcaccattctctagcaaactaagtaaactcatataaagtgaagcggtgtagatattacctactcggcttgataattgtttagcagccgcaaaactacgctccaacttgatcattgttgcttgatcttgcccctcaatcgcaatattattagcttttaagcccatcttagtaaaaggtaaatgataagtaattgcatcaaaatcactagtctttaatcctttttgcttcttataatcagtaaaggtcttcttgaagaaatccaagtaaacttgagtcgaatacttgccgtcaactaaagcggtgcgagaataatttggtctccagaagtcgttaatatcttcgctgtaagctgaatgaccattatttagggctaaaatgcttgggtcagctttgatgagcattgccacgctaccggctccttgtgttacctcaccagcagtattaacaccatagcgagcaatatcactaccgatgacaattgcggtttgttcaggatgtacccgaacaaaatcacgtgccatcattaaggatgccgttaaaccaaagcaagcttcctttacttcaaaagttcttacttctggcttcaactttaaggctgtttttacaaataaagaagctgactttgattgatcaatactactttcagtcccaaaaattaatagaccaactttgttcttatcaatcttgtcaataaactttaaagtcgcattaattcccattgaaactgcatcttgcgtaatatccgcaacactcatctctctttgaccaatgccaactaaaaacttattttgatcttgctttcttgcgttcgccaaatcgaccatatcaacgtacttgtctggcgtaaaaagtccaatttgatcaatacctacttgcattatttttgctaaaagctccttagcatgactttcagaataatttttttcactaatcatcgcagctagtagctgcttgcgctcatgttcattatcggttaactcagcaaccacatttctcgcctgcagtttcatatgtcctgcttgaatgccaacagtagaaattgccagcaaagctgctaggttgttggctaaagccacgctaacaataatctcagctagagttttactcgtgattttttgtcctaaaatagcaaaactttgttggacgtcatgacgggccttaattgagccaccaactactccgatcgccattggcaacgttaattcgccaactaaataactaccctgcatcgtccactttgataaactgcgatattggccatcatgattggctaaaactgcagtggctgcttcaattgcccgataatcattgcctgtggcgattaagacggcgtcggctccattcatgattcccttattgttagttaccgcacgataaggatcgtcaattccaatttttcctaatagagcaacacgttgtgcaacttgcatcccaccaatcgtttgtggatcaatcttcactttagccgtggccaattggctaggataatttgataaaatcgcaaataatttttcatcaacaccagcataattttctaatttagccgctaaaaattccaaaatcgagttggttttattcgcgcccatcgcctcagctggatcaaccaatacttttaagtaaagcaaatcctctttctgcacagcagttatttttctagtaccaccaccatgacggactaagctggaaaacttttgattagctaattcgactaagtgcggaaattctttttctaattcaattaatgaaaaagaattgttgaccttcaaaacgatttgaccataaatcccttgtcggtcgctgctagctgtcacaccaccatttctagcaaagatactagctccatgattggcggcagcaactactgagggttcttcaacagccattggcacccaatatttttgtccattgactattaagttttgtactacgcctaaaggcaaacgcaactgccctacaacattttcactcaattcatctagacgtctcagaaccgcatcatcgatttgctctaatgcaataccttcatcctgcaataatttacgtctagcttcaggctctaattgataaaatttcattctgcattctcgatttcataagcaatcgcctgaccgccaccaatacacaaagtaaccagggcacgtctgccttttctcttctttaatccactaattgcactagcaactaagcgtgtacccgttgcacctaaaggatgacctaacgcgattgcgccacccataatattcaatttatcagttggaatttgtaagtcgcgagctaccgctacactttgggctgcaaaggcttcatttaattcgataatatcatagtcatcaaaattacgccccgtcttcttaagcagttttttaactgcataatatggagtataacccatcagtgcaggatcaaagccagcttccgcaaattcacctaacttggcaatttgcgttaagcctaactctttcattttctccttagttgccagaactaacatacttgcaccatcagtcaaaggagacgagtttccggcagtcacttcaccatccgccttaaaaacaggctttaagttactcaatgcctcaagcgttgtatccggacgaattggttcatcatgatctaaactttgaccatcaatctccacatccaggatctcattatcaaaaaatccggatttaactgctacagctgcctttttatgcgactgcaatgcaaattcatccatatcctgacgactaacatgatatttttctgctacgttttcggcagtaattcccatatgcttgccagaaaaagcatccatcaaaccatcgttaagcatagtacttactaggtgatctgctggatcatttttgttttcttttttaacaaaataaggcgcattagtcatgctctcactaccgccgacagctactagatccaaatcgcctagttccatctgtccttgagctagacgtaaagctttcagacttgagccgcagacttcattaattgtaacggctgcagaagcttcactcatccctgaatgtaaggcaacttggcgagccatattctcacctaagccggtatccaaaacattccccataaacagtgcttgaacatcagctggcttaatattgcccgccttcattgttcctttcaaggccattacacccaaatcaattgcagaagcatccttaaaaaatcctcggtacttgccaaaaggtgttcttttagctgcaacaatataaatgtccttcatatattttctctccattctccataatgtgtattttttaacaaatatgataatagcaaaaaaatattaagaaaaacataaaaagactacgccgcagcgtagtctccctaataattaagcttattttttattttgcttaccttcagcttcaaacttcttgctcaattgcatgatatatgcccgcaattgttccttaatttctgggtgcttcaaaccatattcaattgaagtttcaaggtagccttctttgttaccaacatcatgacgttcgcctttaaaggcatgagcaaagacacgttgagtcttgttcattgtatcaatcgcatcagtcaattgaatttcaccgccacgacctggtttttggttagccaaaatatcaaaaatttcaggtgttaataagtaacgaccaataatggcataatcactaggtgctttatcaatatcaggcttttcaacgaatgacttaacattgatcagtcctggcatgatctcattttccggttcgatgacaccatacttagaaacttcttcatgtggcacaggcataactgcaattgtagaagcatgcgtcttgttatagcgatcgatcaattgcttggtcaatggcaccttatcttccattaagtcgtcgcccaacataactacaaatggttcatccccaacaaaactgcgagcacggaagatggcgtctcctaaacctgctggatgcggttgacgagtgtaatacaagttaacgcctaaatcagtaattccttcggttaggcgaagcaattcttttttacccttttcttccaaatcttgttctagttctggattagaatcaaagtgatcttcaattgggcgtttgttcttgccaattacaattaaaatatcttcgattcctgactttttagcctcttcaacgataaactgaattgttggtttatcaacgataggtaacatttccttaggtaaagccttagttgcaggtaaaaatctagtacccaaaccagctgatgggataacggcttttcttactttcataaaagcacactttctatttcaattttataagttcatcataacaaaatatgcatttttcagctacttagtttttcgtcttttcttttgaatataactggcaatacgaccagcagaatattcaacttgtccaacacggtttcgcacaatagcagcgttaacaccaacgccaaataaaaataatactgctgcaatattcaaccagagcataaagatgataaacgtaccaacaatgccataattctcccaagtaatcgggaaatggtgtaaatagaaactaaaaagaaatgatagggctaaccagcctacaacagttacaaaaactcctggccaaattactctctttttgagttttatattaggcaaaacatagttcaaataccataatgctagcatcataaccaatattaatactggatagcgataactaaagattttgctaatttcattaagtggtagctgaaaaatcggtcctaaaaagttgagtacttgttgcccaaaaaccaaggccaatgtagcaattgtaaatactagaatcatcaatcctgtaaaaacaaaagtaatagttctagtccaaagaaaattaagcattgataattttaattcaacttgatgaaccccataaagtctattttctccaagacgaattgcattaaccatatttgataatgaccaaactgcaaacacaataccaaaagaaatatagcctgttgatgtcgttttcaataaagaatttataattggcataatgaattttgacacttggtctggaaaaaccaagttcaaatattcagcaataggcgcagtatcaatgtgaaacaacggtaacacgttaccaatgataataataatcggaaaaatagaaaacaaaatgtagtaggcaataataattgaactagcaaatatctctccttgagataaggtggttcgtaatgtagaaataaattgcccaatttttaaaccaaaatggtttttaccatttttcatccattatcctaatcatccatctcatcaaagtgagggatgtacttttctaagccatcgtaaggatgctgcagggtcaagatcttaggaccatcttttgtaattgcaaaggtgtgttcaaattgagcagcattagaaccatctggagttgcgtagtaaacccaatcatcgttaggatcatcaacagtacgttggtcgatgtgccagtcgccaccagcttctaccataggttcacaagtaatagtcatgccttcacgcaagcgaagaccatgacctgccttgccccagtgaggaacttctggatcttcatgaattgatggttgaataccgtggccaattaattcacgtacatcaccgtaatgattttcatcttcaacataatgttggatagcagcaccgatatcaccaattctgttacctaaaacagcttggtcaattccgagatacattgcttttttggttacttcaattaatttcttatcagcttcggaaatttcgccaactggataagtagtacatgaatctgattcataaccgttcaagttgcaagttacatcaaccttaacgatatcgccttcctttaagatgcgatcttttcttggagtttggtgggcaatttcatcgttaaccgaaatacaagtaccatacttataaccctcaaaaccttgttctgaaaggcggccgccacgacttgatacgaagtcttgacaaaactcttcaattttccaggtagaaatgcctggcttaatcacatcacgtaagccttcaaacatagttgcaagaagatgtcctgaagcttgcatgcctttaagttcacgaattgatttaattgtaatcaaaataatttctcctttataaatttttatttagtttcagatatttctattataccgttttccaaaatacttttaaaaggtcgggtttttgtagaatcaaaacaaaactctagaaatacctgaaatatttttaaagtttgctaaaactaaacgtttttgcaatagtttcatgtataataaggtgtcgtataatgcagtgaaaggtatgaaaaatcatgaaagcaagaattgtttatgccagcatgactggtaacgatgaagacatggctgatattttagaagaagatcttcaagattatggctttgacgttgaaacaagtgatgtcggcttcactgatgccaatgactacttagatagtgatctttgcatttttatcacctacacctatggtgaaggcgtaatgactgatgaattggcagacttttatggggagttaaaagacttagatctaacaggcaaacattttgctgtgatgggttctggcgataagacctacggtgaacacttttgtgaaaatgtttttgactatgaaaaagcattcaaggattgcggcgcaactgaaattactaaacccgtaacaattgaaaatgcgccagatgatgatgcagtcgctgcaatcgatcaagctgcaaaggaaatggccgataagttaaatggctaataacaaaaaagacgtcacagctgttgatcaggcacaaatacgccgtctaggtcaaaaattaatcaagcgacaccgtaatctttgggtttacatggttttcggctttgtcgctgcattaatcaataccttagtcttcatggtcttacactcatggtggcataatgtgatggtaatttctaacaccatcgccttcatcgtctccaacctggcatctttctggtttaaccaaaaggctgtttttatcaataatgtcgatcatgaacacagcacgtggcataaactaatcgtctttttcacttatcgcgtcatcagtttaatccctgatacattaattatgttagtcggcttatcctggctgcatttaaacgcattactagtcaaaattatcgaccaaattttagtcggtgtattcaattacttaactactagatcagtctttcaaaagcaagaacatactatgattgaacgtgcaaaaatgcgcattcaagaaccaaaaaataaaagagacagcaaaaattaaacaatgtcattaagttaagacattgacaaattatcgacttggacttttaagatcattcatttgcgatttatcgcatttgaatgctcttttttcatgccaaataaacccaaatcttgtttagaaattaggctacacgatataaataatatacagctgatttgggtttgagatttcttttgtcttttcgtcctggtctgatcggaattgtgtaatgactaatttgaataagaatctttttaaagatttcagttgaagaagaaattatatacatagcctggatgacaaaacatgactgtttgaaattgatcgcatattgatacttgcattttttttgtggtacatatgcttgagcatcaatttgactgactgcgttaaacataatcatgtgggcatagatctccatttcaataaatctatcctgcttggaatgaaactgtacgctacctaaagcatatttcaactttttgaatgaagtttcaatgccccagcgcaaatggtagatttctttgatcctttttaagggataatcggctctatttagattagttagaacaacttcccattcttctttgcctgatttaggatcattaattctaaatttacaggcacgaaattttattgtacataactctccaaagtcccagctgccatctttggtatttttagaccgatattttatatattgacggtaatgatggttaaccaaatgaacgttttctgtagccttatgggtttcataataataattagaggtagtcacccagcaagctatatccttatcacactcttgattaggcaactcagctacttccttaaatgcgccatatcccgttttagtacgtatgacataataacagttaggcaggcgattacaattttcaatcatgttaaagccggtataacctcgatccatagtaactatatatggtccgcaatttagctttttaagcatttgaacggcggctttacgttcatccatctttgacttaggctgaaagatgcagtcttgataagtattatttaacaggtcatagagtgcattaacatgaatttggcaatatggctttcctttatgattgagatttccaacgatattctctgatttaggattccagatttgattaaaatcagacccatcaatggcaaatatacgatatttatgatcaaataactggatattaaataaattctgattaaatacagttagaatatgcttaaaacatgcgggtgaaagctgacctttgcgttggacataagcggaagtactgactactttatcgttatttttaatagctttttggccaaaagctctaaacaactcactggtcaaatcttttccttgcatattaatagtagttttaatgactgtagctgcatctaaaaaccgcttcctagtgaaggcatgaggatcatcgataaaatcatgaatatgctttccagtatcattgataatttgatcaagacgatctaaaatatttctgtgaagggctttcataattaacaccagctttctggcaataattttgaaggtttaataatttaatcagagggcgaaaaggtaggttcttttcgcctttattttatgcaaaaaaagaaccaaatcataatgattcggttctacagagattagattcaatttgtcaatgtcttaacttaatgacattgaaaaattaaaactgtctctttatttttttactcaaaatcttttggtttactttcactatcttgattaaagtaataataaatatcatccataattcgatcagctgcatgtccatctccatatggatttttggcattcgccatccgatcatattcgtttttgttttctaacaaagctagcatttcttcacgcaccttgtcgacttcagttccaactaacttcaaggtaccggcctttacgccttcaggacgttccgtcgtatcacgtaaaaccaaaactggtttacctaaactaggagcttcttcttgtacgccacctgaatcagtcatgataaagtatgaacgtttagctaagttatggaaatctaccacatcaagcggctcaatcaaatgaatccttggatcaccaccaagcacttcattagccactttttgtactcgtggagataagtgaaccggataaataatttctacatcaggatgcgaatcaattacttgccgcattactttaaatactcggcgcattggctcaccttgattttctcgacggtgcatagtaaccaaaatcaccttattaccaggagtaattgcgtccattacctcatgatgataatcttgttgtacagtctgtgctaaagcatcgattgccgtatttccagtaacgaaaataaaatcagaatggtgattttccttcagtaaattagccttactcaattcggtcggtgcaaaatataaatcggctaaatcatccgtcatctgccgattcatttcttcaggatatggtgaatacttattccaagttctcagacctgcctccacatgtcccaatgtagtttgctgataaaaagtagctaaagaagccgcaaaactagtcgtcgtatcgccgtgaaccaagacaatatctggtttctcttctttgatcaccttagataaatcaatcatcactttagaagtaatttcttctagagtttgattttggtgcataatattaaagtcataatctggtttaattttaaaaatatctagcacttggtccaacatttcgcggtgttgtgcgctaacgaccgttacttcttcaaaacgatcatctttttttagtttcaaaacaagtggtgccatcttgattgcctctggacgcgttccaaaaacagtcattaccttaattttcctcattaaaaaattcctccgcttaactattttactatacctgattttagactatcttgcacccgctttctgtgttttaatggaagtattaaattgaaagttggtcgatgcatgaattcatcattactattattaattacaactggtttaattattttgattggaactttttgccttgtttttggtatggacaaaaacagacccgctaaaactagaaaatatttactttatactgcactaatctgtgttttcctagtttggggcttaattactgcaattatgcttcaacccttaggataataaagataccttttggataaccaaagcatgtaaaaagcctgcaagaccaatacttgcaggcttatttctatgaccccggtgagattcgaactcacctctacggtttaggagaccattgttctatccagatgaactacggggtcaaacctaagattaactttaccaaaaaaagtggtaatagttaaccttttttagaattgtggattaaaaaatgttttcggatggttggtatcagcaatcttatcagctgctttaacaaaaggcatccaaattagcaaagtaacaatcatatttaaaatgcttaaaacaattgcacgccaatcataattgcaagccagaaatgggccaataactggtggcatgatgctaggtactgccacttgaactggattaaccaatcccataatgctaacccaataagaaaaggcaacattaactagtggcgctaatacaaatggaattagatacactggatttagcactacaggcaggcccaagagaattggttcgccaatgttaaaaattcctggagctagtgagattttggcaattgtgcgataatcactgcgtttagaaaacattaaaatcgccacaattagcattaaggttccaccagcaccgccaaaccaggcaaagacatcaaatgagccacgtacccatacatatggtggaatatttccattactaatcgctgtgatgttatcattttgagcagtcatccaaattgaatccaaaattggtgatagaacccctataccattaattccaaaaaaccaaaataactgcactaataaagtaatgacaattaccgtaccaaagccttgtccccactttactaatggagtttgaattgtggtaagcaaccaatttccaaaatatttaccggtaagaatttggaacaaataattaattccgcctacaccaaatattgcaatcattgcaggtaataaagaatcaaaagcagcttgttcagcatggggcaagttcgatgtcacatgcaacataatccttgctttatagcaagcataataaataaaaaagcctaatgagccaaacaaaatagcagtaaagaggccagtagttgagaactgactaatgtcaaatgcattatgcagtgtaacattatcaccatgaaatttaatcttagctatattggcaatgcttagtgcaaaagaagataatgccacaattgaagcagcaagtctatttccttcaaaagcttttgctagttgatagcctaaagccaatgctaagaaaaaggcaaataatgaaaatgttcctcgccaaactaaattactgattgctaccaatggctgtatcgcaaaagcaaaggcataccagcctaaatgatcatgagctgcttcaattaagctcttaattaaaactgctaatgatcctgccattgtaattggcattaatgagacaaatgcatcccgtaaagcaactagccatcttatctgaccccatctactagctagcggcaaaacatagtcctctagccatctaactaaacgaatcatttctttcctttcaagtaatgtggatgatatcccttgttcttattacgtttcttgcgttttttagttttatttttcttagtcgaagtcttaatgggctgctctttagcctgcttcttttccttcttgagtttaggcttttcagttgttaaatgatagcctgcaaagtagacacgctctatttgtaattgatctgccaataatttcttcaaatcacgaaaatcgtgatcatcgcctaaggtaaccacataaccttcagcgttcattcgacctgttcttcctgcccggtgcatgtaagtattagtctcgctcggaatatcaaaattaatcacataggtaaggcctggaatgtccaacccacgcgcagccaaatccgttgctagcagcaatttcgtcttaccagtagctaggtcatttaaggctttttcacggcgttctttaccaaattcattagctaataattcgaacttagtcttagtatgcccaaaaataccagcaaagcgcatcatcgttttatttgaatcaaagaacaaaattcccttaaagtgatccaacttagtcattcgctgcaaaaattcaatcttgtgttgattgtctacttgcaaaaaataatgtttagtcgctgaagcttgttcatttctgacatctactaacaagaaatgacggttaaaaacttgctccgcatcccgtgtaatctcagaatctgttgctccaaataataagatttgactgtctggacccagattttgccctaatgctgataacaattccattttagtaaattctaaaatatcatcggcttcatcaataatcaaagtcttgatctggtttactttaattcgaccacttgagaagaagtcaaaaaaacggcctggtgtagctacgaccacttcaggatgctttttcttcagattgtcttcttgtctctttctattgccagcaccaaccaagctgacgccttttaatcctaaagcgtggatgtaaggattaattgcatgacgaatttgtacagctaattcagtcgttggcgcaataattaccacgctgttagcattacctggctgtgctttttccaaactaggaagtgcataagccaatgtcttacccgtacctgtcttagccaatccaaccaggctcgcaccattgcgaatggcatcatagctttctttttgaattaaagttggctggtccttgtgttctctaattaaaacttgtttgattttttcttgatacattattactgtgttaattgcccatacttttgcttatattgaccaacggtcccgttatacgcgtacatcgttacctggctttctaagcctgaaacattccttacgcgtccgttagtagtgtagcaccaaaatgaatactttaatttattcggtgccttactatctgatgacataaataacgtttgcggattaaagtaatgttgatatttatgatcaactttcaccatgactcttttgccagctgcttgcaataaagccgcaaactgccccattgaccgcaaatatctcgctgaacgagtagtcactgccggtacaattagaattggcagcgagcccgtattttgtcctacttgcttaaaaaaagtagcggtaatgctgcatcggagtcgattcattgctataggaaatctcactaccaaatgccaagttcgttcctaaaatttggtcacgataagacagatagttttcatcaaaatatgatctgccttgggttgctttcaaatatataaaggaaacgccattagattgcaatttatgtaaatcaacatagtcaatatcttgatttaactcaatcccaatcgcacttgaattagcatctggcggtaaagttgtttgccgcttaaaattgaaaaagccaatcaaaagaaatgcaatcgccagaattaataaagtcaaaatcgctggcaaagtatacttatgctgaaatcttttcatcggctaaattcctcccttaattattttaaccgaaaagcctatcaatacaaaaatttccgagactgtaaaatagtttgtgtaaggatgaatgattccttaaatttatttctttaaacattagaaaaaggagttcctttctcgtatgattggtttgaacaaaaaaaacacatacagaaagaagaactccttcatgaatgattttaccaaagattttgctcaagctctattcaatccagacaaaataaatgatttattgcgcaaagaactacaacaggctgttaataacttgctagaagctgaattgactgcctttctgggctatgatccctatgccagaaatggctggaatactggcaactctagaaatggtgcttatttccgcaaagttgatacgcaatttggcccaattgaagtgcaagtgcctcgggatcgcaacggtcaatttcatcagcacacgctgcctgactacaagcagcactcggatatcttggaaagcatgattatcaagctttactccaagggcgtgaccaccagggaaatagccgatctaattgaaaagatgtatggcagccattacagtccagctcaggtatcaaatatttccaagcagatgattccaaaggttgaggcttaccacaagcgcaagctaagcgacaagtttttctgtgtctatttggatgcgacataccttcctttgcgccgagaaacgtttgagcgtgaagcagtctatattgccattggcattaaacctaatggacataaggaagtcattgactactgcattgctcctagtgagaacattgaagtctggacagagatgcttcaaaacatgaagtccagaggcttgaagcaagttgaactctttctttctgatggtgttgttggcatgaaaacagccttggccaggacttatcctaaagctcattttcaacgctgcctggttcatgtcatgcgcaatatctgtgctaaagtccgggtggatgaccgcgaaaagatcatgaacgaattcaagcagatacatcaacagacaagcaaaaaagaagctgcagctgtcttgcacaaattctatgccagatggaataaagcttatagcaatgtcatcaaaggtttgaaggaaattgagcccgatctgctggtcttctacaattatcccaaacaaatcagagcttcaatttattcaaccaatatgattgaatcctttaacaacgtcatcaagcgtaaagctaagcctaaggcagaatttccaactgaacagtcgcttgatgcatttattggcatccaggcaatgagctacaatgaccgctatttcaaccgaattcataaaggctttggtcaggttcaggataccttagaatcttattttgaataaataattaaaaaatcaatttacgagaaagaactatttacacaaaagatttgacagtttcaaatttccagtcgatgtgctaaaatttaaataatgtaaacgaagggcaacaaataaatatgaaacgacaaatctcatttggccaagcattggctaccgtagtcggttctgtcatcggagctggcgtatttttcaagatcggaacaattactgcacaaactggcagcacttcaatgaccctgtttgtatggattttagctgggatcatttcaattgcatcaggtttgaccatttcagaaattgccgccagcttaaaaattaatggtgccattaagtatcttgattacacttacggccgcgtgtggggttttctttttggctgggcacaaatgattgtttattttccagctcaaattggtgccctaagctcaatttttggcgttcagtttgtctccttatttggaattaaggcgaggtattctaacctaatagctatcttgctagtgctttttctcttaggaattaatctaatcggaactaaattttctagcaaaatgcagtcggtcatcactatcctaaaaatcattccaattgctttaattattatttggggattatttaatcctgccaaaatacctgcaccaattattccgttaacagtcggcactggacattcatttccaaccgccattagtcaagggttactttctgcgttattcgccttcgaaggctggattgtagtgactaatttggctaacgaagtcaaaaatccagaaaaagacctttcacgggcaattattttaggtctttcagcaattacattgatttatgttttaatcaattatactttcatgaccgttttacctattgatcaattaactaataacaataatgccgcgtttcaagcttcaatgaaattgtttggtcaatttggtggaaaactagtcactgtgggaattttaatttctgtttacggtgcggttaacgcattcatgctgacagggatgcgcacgccttatatcttggctcaagacaatttattgccattctccaataaaattggcaaggctaatatccataccggtgttccagtagttggcgcgtttattgttgatgctattgcaattgtcatgattctactaggtaattttactgttttaactgacatgctagtcttcgttatgtggactttcaacacaatgttgtcagttgccgtaataattttgagaaagcgtgagccagaattaaaacgtccatttaaggttccatggtatccgatcattccaattatttccgtgatcggtggtatcttcatcgttgtctcaacaattatcaatcaatttgttctttcaattattggtattggtttaacattgttaggactgccaatttactattacatgcaaaagaaaaataattaacgaaaaaagccgccgattttgggtgactttttatttgagtaaatatatttcctgaattgtcaaattaagtgcaacagttaggttatgaagagatatattgcttgaagagtttctctgctgtgtgatattggaggattcggcgatatttgtggttaatggcatcagttgcctgttgaacataagcttttgacttgtctttcatgctcttgctcttagggaagaattgacgcaaaagaccattgcagttctcattggtgcccctttcccatggagaatatgggtgagcaaagtaaatctggcagcccttgatcttggtcatatccgcaaactcagagccattgtcaaacgtgattgatttaaaccaggcaggatgtctgtcaatctccttttgaagcagcctttggcatgtgcttgcccgatagtcaggaatcttgataactacttcaaagcgtgtggttctttcagtcaaagtcattaaagcaggctgattcttgcgtctgacgcctttaaccagatctccttcccagtgcagcggagcttttctgtcttcaatctctttaggacgctgttcaatggaattgccaagatgcttcttgtgcaaagcgtgaccgccatggctgtgatgacgcttgttcctgcgtcttttgagcttcataggcagatcaatattgcttatgtccagcaagccctgatcaatatagcgatagacagttggtgtgctgggacaagggtagcctggcatagtccttttgaattcaccaacgaactcatcgatgctggtggcatcaaatttagctttaaagcgtctggagagcattctcaaaaagacagcataatgcttcaatggattgcgctgatagcagtttttgcgacgcttctcataataaatctgtgcagtatcagcgtaatagtgctcatacaataaatagctgctgtctctttgcaggacacttccgcgtttgatttcgcgactgattgtcgacttatggcagccgacttcttgagcgataacagtacgggaagttatgccggaatccagcattgcttgaatttgtccacgttgtacgctggttaattgatgatagtgcttagaaatgctagaatttgaattggtcataaagatcttcctttcttgatttttcgtcacttcaagtttaggtcttcatggcctttttgtttaacacttagtgttgcacttcaattttaaatccggggagtaaatatatttattaatgttgtgaagcaccgctagttgcatcattttcttgatgatcttcataggcagtattggcagcaattcgaccaaaagtgaaaatatctgccaaggagttaccacccaaacgattaccagcatgaatgccaccagcattttcaccagcagaatatagaccatcaataatttgaccatctttattcaaaacatgtgccttagtatcaattactaagccgcccatagtgtggtgaatagcaggctttctcggagtagcatagaatggtgcaacttcacatttgaggcctaatacattcttatggaagtctggatcctcgccacgatcaacgtaagaattataatcctggatagttttaaccaaaactgctggattcattccaatttgttttgccaaatcttcaagcgtatcagctctaaacaaggttccagccttaacttgcgcatcaagtgactcttgggttgtattgtaagcagtgtccttaatcttatcgtccgcaatttgataaatcaaaccaccattttcgataactgccttagccaaaacatcccgttccgcaaattcattaacaaacctcttaccctttttgttaaccataatatagttagcaggcggagttacaacaccagtgaaaagctcaccggtctttggatcagctactggcattaattggataaagcccataccgaataagtctgcaccagcttcaagacctaagttaatcccatcgccagtaattgcaggtgaattagttgttgtactatcgtactatcgtctgcaatgtttggccaataggtattgtatttttgaaccatcttagtattggcaccaaagccacctgccgttaaaattactgccttagcatgcacagtcaaagtactaccgtcagcgcgtgtcgcaattacaccgcgtactttgccatcttcaataattagtttttcaacacgagtttcaagatatggatcgacaccatgctctcttatccaatcacccaaaacgtgaataaaggcataacctaatggctctactggcttatgacctctgcgccacaaaccaccaactggttctgtaacttgagaattatcaaacttaacacccaaatcttggagccatttaacagaatttaaagcattagttaccaattcatgtaccaaagcatatttaccatgaatttcgttaccttttaaatcagtccttttaccacctaaataagtttgaatttcatggagtaaagtcgaatcaaataaataatctgtaccagaatcaatatattctttgatttgtctttgtaatctttcaaaatcaaagcggtattctaaatcaatttgttcaattggcgtattagccaagtcttctaaagtctgtttttcaccaggaagagccttaaatttactttgccattctggttcagccgcattcattggaccaccagcacggctagtattaccaccgatctgtggatacttttcgagaacagccaccctttcaccatgttgaattgagcgaactgcagctgctagaccagcgccacctgcaccaactacagctacatcaacagtaatttcttcatcttctacctttgtagcagcgggcttttcacggtttttccattcggttgaatcgccgcctgcttcatcaattgcttcggctacgccatcaatcacaccatgactggaaatagtcgcgccactgaccgcatcaacgtttaaagtttgattttccacaattgttttaggcaaacgtctaaatacttcatcggctactcccttagtttcacctgatgaatctactttgattgaagtaactttatcgccatcaatgtcaacttccattggcattgattcggaaccatgacctttagcttttacttgatattttcctgacttcattgcttacacctctaataagtttaattttatccacaagttaatattagtgcgtcatctgttgatgtatcaaatatcaatttcactatactttcataataaaattgttatgagataactatgtttcgttctccaaataaaaaaagcttaatgcaaatagttatccacattaaactttttaattgcatgatttaattaataaactgaaacttgaaagctaagattaacgctccttccccgcgcctcttggctttttcttatcaaaaataaaaacgcaggatctctctgcgttatactttaagtgtcaacctgaaaagtaaaggagatcctacgcaatgaacagtatagaacaaatcgacacagaaaacgataccaaatccttaatttcttcatttattaatctaattggtctagctaagttgactaaacaagtcaactttaagcgtaaatctaccgtttcattaaccatgattatctcttggctgatgtctgtacattttgctcggctttccttattcagagctaagagtgacaagcgtttttccgttagaactgctcgcaatgtacttaacgatggaagaatcaactggcaaaaactattatgcttgattgcagctcggctcattggctgcttcaaacatccgtaaaaagaaacattatctttattcaagcatagttgaggctcaatatcatggacatatctttttattaaagctcgtttttgtctccaaccgtggaaacaagaacaagtatttagttttagctactactcagacaaagcttagacctaaagaaatcatccaactttatggtcgtagatggcaaattgaaacatattttaagacgtataagcaatatcttgctttagataaatctcaagttcaaagctatgatggacaatgtggctatatcgcagttacagcaataacttatgatctattggcctggcaggaaagacaaaatacagatgataagacaatcggagatttattctatctaatgaacgaatccttacctgatattagattcgtagatgcattggtctacttaatttcagaattaaaagagcttaaacagaatagttttgaaaagatagatgaagtaatcaatgactttattaaccaactgccacgattcatacaaattgcactgaaacagatcatataaaaactaattacgtctagaaaagctcaatagtgacaggacttgagcttgattttggtgctttcaagtttcagtatttaaattaagcttcagaggcgcctgatacagcatctgcttcttgttcatttgaaacagtaaaataattataattggtattatccgcagcagtcgtacctgcaacaaaaccagaagcatagctccaagaattcatcatacttggcattgaatcatgaccattagcaccaccaacaatttctcctgcagcatagaagttacttacgggattcatatcattgtcaagaagctgcatttgatcagtagtttcatatccacccaaagttgtgcagaacagaagtttttgttcaattacataatatgtatcgccttcgaactcatgcataaacttcttgtctctaccaaactcaggatcataatctgctttaacatcttcagtatagttatccacagtttccttcagcgtttgataatcaatacctgctttttctgccacggtcttcaagtcgcctttgaccagaactggactcttctcgccaaccaaatcaaagaatgattgaacctcttccttggtaaagccatacttaagcattaattcatagaaacggtcccaggttctttgatccatgacaatgtaagctaccttacccttttgttcagcaatcgcatccctaaaatgcgtataaggtgcagattcgttaactattctcttaccatcagtattaacaaaaatagcccccatatcggtcgcttctttagttgaataagttgttagcttagcaataccaggttcaacttccaatccatgtggatataccttataccagtctaagttacgagtaaccaaattcatatttttggcaaaatcaagataatcaccagttgaagtcattggaccataatatggaatatcagtcttatgagcctgataatcacgtgcaccccaaccaccagcagctaaaacaagtgacttgaaattgacattaattgtctggtgcttgccttcagcggttaaagataccagtttgccagccttatctttattcaacttttcaacacgggcatctaagataatttgtccgccctttttttcaaatgcctcagccaccttagtcactagttcatatgagctttcactaggcatttcaatttgacgatatacactatgttcaactgtttgggtttccgctttttgataagtcaaatttgcaaattcagtaataaagtctactgccttcccaatattgttagctaatagctttgacaacattggataattagtaccgcggcattcacgagtaatatcttgaactagtctatttggcgaatccttctttgccgtttcaccaaataattctgcagaaactttagagccagttcctacaacatttgagccatttaaaatagttgctccacctaaatagccatttttttcaagtacaactacttttttacccatcgaaagagcacgacttgccgccattaacccggccataccggagccaattacagccacatcaacatttagttgcctttcttcatgtacgacttctggcttttttccgtcaagagcaatgttattttcggctaatgcttttttaccagaatctagcattgcttgagtcatcaatgatgccccagaaacagcgtccacgtcaaaactttgattatcaataatatttttctttaatttaccaaaagtttgattaaaaattgcaggagtttccgaattcttggttactttgacatcactaattttattgttttctaagtcaatctcaaaatcaatttgaccattgcgaccatctgcttgagctttaatagtttgtttggtcataaaaactactcctttacttgttctttttactaaaccgcttatattataaccacaatattaaatctaaaaaataaatttaatttgatattttaatagaatttttttatcaaaagcagtaaataaaagcgagtgatcattctcactcgcttgattctttatctaattttcatccttatttattagcgtaatgttgaataacttctggcttcaataccccaacataaggaaggttacgatacatatttaaaaagtccaaaccataacccactacgaattcattgccaacctttgaaccataatattctaattcaacatcggtagttcttctggcttccttatttagcattgcacaacacttaacgctcttagcgccacgtgccataatgtgttctttcatgaatttcaaagttaaacccgtatcaacgatatcttcgacaattaaaacatcgcgatccttcacgtcagttaccaaatctgatactatcttgaccttaccagttgactcaaagccatcaccataactagaaacatcgagaaaatccagttgatgtgctacgtccatttgtcgagttaagtcagtcaagaagtaaattgcacccttcaaagccccaacaactaccggctttttaccagcatagtcctcagttaattgcttacctaaacggacgcacatctcatgaatgtcatcttctgtgaataatttgtgatctataatttggtcaatattgtcgccttttgccatttaatctacccttcaattcaatttacatatattattcctaataaaaagaattataacatctttaaacaaaaaaagcgtcattttcaacgcttcctctgaataatttctaattttcatcctttgattgatcgtctttttgatctttatccttaatcggttcaacgataaaccagcgcataaagccttgttcgatactgtctaaggtaaacttatatccttcaagttcaattgattcaccctttttcaagttaggataatgttccatcatgtaaccaccaatggtaataatatcgctatcttgaaaggccttcagatctgtatggaagaaacgctcaaagtcatataaagtcgtcttacctgaaacatgaacttgaccatccttgtccttgataatgtaatcatctgaaacatcatcaatttcatccttaacagaaccgaaaagctcttcataaatatccttatcagtaacgatcccactagtaccaccatattcgtcaactactaagacaattggtgtgtgcttagaaatcatcaagtgcaagatatcttgaattggcattgattcaggtaccgtgataatagttctaataattcttgttactggtacgttgccatcaatttggctttgttgcacaatgtcgtacgcataaacataacccacaacgtcatctttatcattatcacgcacaactggaaaacgactgtagccttcttccaagtattttttcaaggcataggcaattgtatcagttgaatcaagtactgacaatcttgttctgtcagtcatgatgtccttagcaaccttatcgtttaattcgaaagctctttccatataagttaagtcttctttatcaagcgaaccaccatgaaccgcattacgcgacaacttgatgatttcagattgtgaataaacttcattttcttcatcagctggagtaaagcccatcaattttaagattccattggagctagtatttaatagccaaacgaatggataaacaatcgtatggaaaatatgaagtggcgtaacgatccccatcatcatcggtactggcttgtcaatcgcaatattcttaggcacaacttcagttaagacaacttccaaataagttaataaaactacgcctaagattgcactaactgacttgatgagtgaatcattcattggcgtcaaatggaaaagatcttccaatatggttgcgaatgtatcagccgagaaccaacccaagactacaccaaccaaagtggtaccaacctgagtagttgacaaatactcattcaagttgtgcgtcatatgcaaagcacgacgcaactttttcttatttccttgacccttagcaagcatatcttcgagctgacttggtctagtttgaactaacgcaaattccgcagcaacaaagaatgatgcaacgataaatattaataatgttgcaactaaattagttactatttgagctggactcaaagtattatcacctttttttacaaatatattactaaaacctattttaccatttcttgcctaaaatagtgcagttttacacaagggataacggttttttgtaatttattcgaccaccttgtaaatttcattaaacggtacacgctttggaataaatttaggatcattaatttcagcattcttgtcgatatagccaactgcaattgccattccgacagcttcatcatctggaatttgggcatattctctaaccaattctgggtatgaaaccattgagtgagctggcatcacacctaagccacggttaatggctaaaagcatgatactttgtgcaaaaattcctaagtcaaaaacggaccaagctggagatttcttcggaaccgttaaaaagataattgctggtgcattgaacattgttttattcgcatcattaaataattgaagcttatttctgaaaaagaaactttgggatgcacccatcgtagccatattacgacttggataagtatcccaatctagtgatagcattgaagcaaaatcttcatgtgcaacttctttatcatcaatctttttagctgaagcagccttaaacttgcttaaagcatcccccatcaaaacatatgcacgccatggctgagaattaagcaatgaaggtgattgctgtgccattttaacgattccagcaattgttttttcttgtaattttctattagtaaacttccgcgttacatgttccttttcataaacatccttaaaattcatttttcctcaattcctttttgcttatataataacaatctatattttattatagtaaaaaactgttaaaaagcttaattattgctcttttcttgctttttcttttctgctgcctgtttttttaaataagcactcattgcaagatcattttttcgcatagcaataaacgcagtaatggttaaagttaatccgccaagacaaatcacaagtaagccaatcggaaacaagaagtctgctcccttaggaataaatgatgccttaattacccagcatgctataccaattaacatcaaaactatacccacaatgactgccttagtgttcggtcgatatcttttcataaatgcccttctttcttaattaacattctaacagaaaaagcttagcttcaacgtagaagctaagccgaaaactagagaaatagtcgttaaatttttacatgagagaggggaaagttgactatttaagttcgatagtttgtactttttgggaatgttcaacactgcctttttcaatcggagtaactgacttaatcaggtccatgttggtgtagacaacgatgcagctgtcatcgtatcccttgtctgtaatcatttggaaatccattgtggctaagggttgacctttcttaactttatcgccttgactaacattcactgtaaacggagcaccttttagttcaacagtatcaagacccaagtgaatcaaaaactcaataccttggtcattcgtgataccaatagcatgtttagttgggaagagtgtggaaatactaccatcaactggtgcatagatatgattatccttaggcttgatagcatagccatcacctaacatcttagttgagaagacatcgtcttttacatcagtaattggcataatgtcgccgtcaactaccgcatctacttcaatacccttattctttttcttaaagaaattaaacataattaataacctctggatttctaaaattcaagtaataatatcaacataaagcttgcgagtaataaaccagctgcagtaagtgaaattgcgattattactcgactaacgccatcttgtgtcttcttcaaagctcttgctcgataaaaacctaagatagctaatactacgcaaagcaagttgccaacaaagagctgagcaatcatctgacttcccatcaagaagcgataagtctgtcgattgattaaaaactgcttgtggtttaacaacatatagtagcctagtatgaagtcaacgatagcaacgattgtactaatcgcaatcatcggctgcttcataatcatcatccgaatcgattgaccagaagcaccgcttcgtagtgcaatcatcgcccaaaacaatagtggagcaatgaaaagtacgtatgaataccaagtcaaaatcttcttagtatccaagtgcatgctttcggttattcgatcgataaagttgccaacttttcgtttactaattgcccacattgatctctacatcctctccttgactctgttgccaagctacatattcactaattaccaaatcaattaagaagtacgctggggtaaaggcaaccttcccgctcttaaagtcggcatcatcagtaaaggcaatcgttggaaaataaatgttgtgctgcactaatgaagctaatttattttgcttcaggttagtgaacgaaacatatttgaatttatcattcactagttccaacttagtgatttcctcattgatcgttttattatcacccgtaaacgagataataaacaaaacatcgcctttttgagcaaagcgtcccgcagcttttaactcctctaatgctgatggcaaaacagttgcatgcttgccaactacaaacaattcatgagccaaatattgtgcgattaactcttgttgccaaccagtagagtaaatgtaaattgtccctgcattatctaaatcgcgatacaagctattgaaatcacgttgtttgaaatacttcaacacgtctgaatttactttactaagttcccgcgcaaaattattttcaattttgattggtttttgcttcgattcggctaattcgaccaaatcaaatttaagctcactgtagccacttagtcctagctttttacataaccggaaaattgcggattcggatacataaagctttttagctaatttggctaagcttaatttgctacagtctctcggattatttagaacatattgaactatctgtttttcagaatcattcaacttatgactattgtcatagaccattgatctcaaatttgccataatacctgtgcccttatcaatatataatttatatattaatgataacacaagcgctttcagattatagcaattgtttcatttgatcaacaacttgatcggcatccaatccgacaacgatgtcaacctcgttgttatctttatgttgtacttcgtaagaatctgcgatcttcttgaattctgaatctggagcgaccttcttaggatcaacgacatgagttcttactctagttgagcaagcaatgacatcttgaatgttggagtcaccaccaagcaagtcaacgataccagtagctctttcaatataaggattatcttgttcagttgataccttagcgtcgccaccttgttgttgcattaaagtgttcatttcatcaagaacttgaggtacgtccaaacctacgataacttggatagccttaccgtggtgtacgacattgacagccttgtttgctttaaatgcggcatctgaagcaactttatttggatcggcaacagatacacgtaatctagtagcacatgaactcaattctgtaatgtttgaaggaccacctaataattcaaggtaagcagttgctctttcaatgtaagggtcattagcgtccttaccagcagcttctgcagccttcttagccttgtattctttctttgaaagaaggtgaacatcttgatcatcggcttcacgacctggagtaatgtaattgaacttctcgatcatgatcttgaagacaaagtaagtaataataccgaagataataccaacgataaattccatcacataggtcttccagtggtttggccaaagtggaatccagttcattgaagcgataccgatcgcaccatctgacatgaatcctcttaaaccaaaggcccacataactgtgttcatcgtggctgacaatactgagtaaactacccaaagaactggagcagcaaacaaataagtaaagtcgataggttcagtaataccagctaatactgaggttaaagcagctgggataagcaaagctgaagtttgcttcttcttgttcttcttagcagttgcgtagaaggcaagacagataaatggtactaagaataccttttcgttaccgtaaagttggaatccttcaactgaagcgatttgtgaaagtggtttagtacttgcagcgtattcagcaaggtgtttcaaccagtatggttgcaaaccgccggcaacaacggctggaccgaattggaatggaatgtataccaagtggtgaagaccagtaggaatcaatacacggttcaagaattggtaaatccaaacaccgataaatccactatctacgatgaagtgttgcatgctggtgatacccatttgaacttttggccagccccagcaggtaatgagtgctaaaggaatcattacgaagaatgctaaagcgtagacataagttgaaccttggaaagtaccaagccagtctggcaacttcttatcaaagtacttattgtgtaaccacactacaataagagcaacaaccaaggcacctaagatactagtgtcaagagtcttgataccagcaatgttagttaaaccatggttagtagcgttagcaacaatttggatcttgtcaaagttaggaataccaaaagctgcaccccagtgggtaagcattgcaccgatgaagtagttgtaagtcaagtaagcaataactgcttccatggctgctctacctctagccttgttggctaaaccgattggcaaacctacagtaaacaaaataccttcttggttgaacactgtccaaccaccagctgaaattgtgtcccaaactgagttccatgtagttcccgggttggcaattaaaccaaacagagtcgggttattgaacaaactacctaaagctacgacaatacccgcaaacgagaacagcataactgggacgaacatagcggccccaaaccgctgtattttctgcatcataatcgtttacctctgaagaaaaaaattaaatcaataacttattcttacatctacacctgcatctacatctttatttcatcagatcaagtcaaccgcaaggtgctcatacaattgacttttgccatttgtgcttcacacaaatatttactcctcaaaaatgttttaagataaaacgtccagttgatatcaaattctgaacttaactctatcttagtagctagcttacatttttatttataccatagttttaagctaatgtaagcgttttttaaaactatgacttattgtttcataaagttaagatgatatttcatttcatgaaatttatttcagcccttcaatgatgtatataccaatatttatacccctttattttgcttgtcgcgcctatgtttaatcatttactttacatacaaaaataacatgtcaataaatatgctatagacattctctatttatacacataaaatcctctgaaatatatttcatttcatgaaacgaaacaagtgataaaacctttttcctttccaagatgaactactttgcttactgaaataacacaaagtctggcataattaacggtaagttaaatgcacaggaggaattattatgacaatcaaatttattgcacttgataccgacggtaccttgcttaattcaacaggtaagattttgcccagtacaaaaaaggcagttaaaacagctttagaccaaggaataaaagttgctttatgttctggtcggccaatcgcaggattaaaacattttatggacgaattaggaattattggacctaatcaatatgctatcactcttaatggcgcaattacccgcacagcagatggcaagataatgactaaagatctagtttctaatcgactttatcgtaaaatgtatgcttttgctaacgagcatcatttaccttttaacgttgtttcccctgattcaaaaataattacaggagatcatgatgttgatttaatggtttatactcaagcttacgaaaatagtgcgactttatacattagagagctagatgaattgcctagtgattttgaaattgctaaaggttgttttgccactaaagctaagttgttagaccaatgggaggataaaattcgccaagaatttgggcaagagctgtatattgttcgtgccgacgattgcttcttagagctacttcaccctaatgttaataaaggaaccggattaaaagaattaactgaaaaacttggcattactccagaagaggtcatggcaattggagacgaaagaaatgatattaccatgtttgactttgctggaacagctgtttgcatgggtaatggctccgaagaagcgaaaaagcatgctgattatgttaccacttcaaatgacgaagatggcatcagcaatgcttttgagaaatttttatgaacaacctaaaacaagtatctgagaagtgattaatctttcctagatacttgttttattatttgttcaaatattcacgcaaagctggcaaaactttctccgcctcaactcgtccgacctcatacactcgtcgcatctcttttttatctgtttctaaagtgccaatttcaagcggaaacggtggacgaataataaaagcttggtcagcagcttcatcttttaccatctgatcaagcaccgcattataatcctcagctttagtagccaatttttttactactgcggggtatttccttaaaattactttttccagtggatagagcttactctgctttttgcgataagacttcggctgtgtagcaatgactacctttttatcacagttttgctgctctaaaaaatcatacggaattgaatcagatacaccgccatcaaagtaataatgcccatgaattgcaactggatgagcaaaaaatggaatcgacgacgaggctctaatccactctaagtcaacataacctgcatcatgtaattgatgataaaccggctcacctgttgcagcatcagttgcaacacaccaaaagtccattggattagtcataaatttttctttatcaaaaacatccaacttatcaggcaaaatatggtaacaaaagttagccgcatacaaattgcctgaccgccgccatgatttccaactagcataatatggtttccccgcaaagcgcatgttgtagcgcaatactcttcccttttgctccgacttcaagtttacgccaaaggcagcaccggctgaaacgccaattgctaaatcaaaggttatgtcattttctaaaaacacatcaattacgccagctgtaaacagcccacgcattgctccaccttcaagtactaacccacttttcatattttccctctttatcaaaaaagacctacgcttttcgcataggtctaatttattcttattttaattttacttcaagcccgaccattgccattcggttacttctggcatgtctttaccattgtcgcggatgtattggtggtgcttttcaagcaagtaatccatgtgactgatgaagtccgcattcttgcccttcaaagctgggatgctttctacggcatccttagctaggtcaaagcgatcaagatgattcaatacccgcatgtcaaatggggtagtaatatcaccattttcttcatagcagtgaatatgaacattgtaacgcttgcgagcaaaccaaatggattccatcatgctcttgtagccatgccatgcaaagattactggtacatccttagggaataatctgtcaaattcttcagttgacaagccattcttgttgtcctttggatccattaacttcataacatcaactacgttaatgtagcgaatcttgagatctgggaacttcttatgcaaaatatcaattgcggccaaagtttcaatagttggctcagtttcagttgaagcaaagacaacatccggcttagcacccttatcagttgaagcccagtcaatgtagcttaagcccttgtcaaccaacttttgtgcttcttcaattgagaaccattgtggacgaggctgcttagaagttaccaaaacattgatgcattctctatctttcaaggccttatcgccaactgccaaaagcgtattagtgtctgatggcaagtattcatgaacaagatctggacggttcttttcatacaagtgagtcaagatgcctggatcttggtgagtgtaaccattgtggtcttgttggaatacagttgaagttgcgacaaagttaagtgatggataatcatgacgccagtattgttccttagcctttctgagccacttcatatgttgagtaagcatagagtcaactacccggccaaaggcttcataagtagcgaagaagccatgacggccagtcaaaacgtagccttcgagaaagccttcatcttggtgctctgacaattgtgaatcaattactcgaccgctaggagccaggttttcatcatttggttcatgaatctctggttcccattgccgcttttgatcgtcaagcaattggaacagacggtttgacttggattcatctgggccaaagccgcggaaagtagttgggttgagcttagcaacttcatccaagtacttagcccattcaaccatgtcttgtgcctccatagaacctggcttgtcaaacttcaaagcaaatttgcggtagtctggcaagttaagccgcttaggatcaagaccaccgttagtgattgggttcatggccattctatgttcacccttagcagtgttttcagttacgatttccttaggtgaaccgtcttcattaaacaattcttccggcttgtagctttccagccaatcagtaagcatatcagcgtgttccatatcgccttgagcaactggaattggaatttggtgagcacggaagctgttctcaattgggttgccatccaagtccttctttggaccagtccagcccttagggcattggaagataatcattggccagtgtggcaaagtagcgtcattgttttcacgggcgtgcttttgaatagccttgatttcttcaatgacttcatccatggtcttagccatttcttcgtgaacctgcattgggtccttttcaccgtcaaaacgaccacccttaaagactgaaacaaagtgaggatcccagcccatgccacggaagtattcggttaattcttgatcgctcatgcgagaaacaatggttgggttagaaatcttaaagccgttgatttgcaagattggcagaactgcaccatctttaattgggttaatgaacttgtcactaaaccatgaagcagctaagggaccagtttcagcttcaccatcaccaatttcaacagcggcaataacatctggattatccaaaacagcaccagtaccgtgtgacagtgagtagcctaattccccaccttcatgaattgaacctggagtttcaggagcagcgtgagaagcaacaccgcctgggaaactgaagcgtttgaatagcttagccatccccttttggtcctgggtaatctctgggtaacgttcagtatatgaaccatcaagatatgagttagaaaccattacctgaccaccgtgacctgaaccctcaatatagaacatgttcaagtcatacttcttaagcacacgattcaagtgagcataaataaagttctgtggtgcaatagtgccccagtgaccaattggcttaggcttaacgtcttctgcaaccaatggggtcttaagaagagggttcttcatcaagaacaactgaccaactgacaagtagttggctgcgcgccaataagcatcaacgctctttaaatagtcttttgagtcataatcaactgccatcttattctcctttgagcatctaagagtgctctttttcatttgttcttttgtttacacttatatcataccaaattatctaaaaagttcaactatttttataattggatcctaccaattaaaaaataagtatttaatttaaaattgcatcccttttttgttgctatatcaaccttttaatgctttgatataagtatttagttgcttaaatactgataagtacagataaacaaatatcaaatactgacataatcagtgcaaaattattcattcatgttagattactaaatggagggcatgagatgacccaagaagaaagattaatacaaattaaacagttacttaaaaaaaagcaccaattatcaactagacagattgcagctcacttcaatgtatcatttgatacggcaagacgagatgtaattcatctaactgaaactggtcaagcaattagagttcatggtggtttgatggaaattaattgcaacagcgtacctgattttttagcaagaaatcaagtacaatcaccggttaagatgaaaatggctagaatggcaaagagatttgttcatccaggtcaatgtgatttcatcggttcatcaactacgttaaagcagctctgtccaatgcttaatggtattgacatgcagatcgtcacgaattcaatcgacaacgcattaagcttattagcaatagaaatcccatcagtcagattgttgggcggcgttatcaacaaaaagcagcgtttcatttattctgaaacagcattagaaacattgcgtcaaatccatttcaatactgcatttattggtggatctcgaatcagagatgacggcgtatatacaccaagcatggctgattccaaaattgtcgaaaccgccgctagtcgcgctaatcaagttgtattagttgccgaaaaatataaatttactaatcaatcctcttcgccatacatgtctgtccccctcaatcagatcgatgtccttattaccgacaccccattgcctgaggaattaaagcatcattttaatccaaaaacgcaaattatacctgttttaaaggagtgatagttatgttcagtctctttaaccaaaagaaacaaagcgaaagtcgtgaagtataccaagatttgaagaatttttataatagtttttttagcaatatctacaatgaaatgaatattggtcgctatcggcagattcgcgatgcaattgggcttgttcttaataagttcgacagtggtgatcatcctcttgaatacactagcaaattggtcatgtatattcaggctcgaattgccatgaatcacctgcatctaactcatgaacagcaagacctaatgaaaaagctaagtgacgctaccaaatatgtaaatctttcttatgtttatctgagtccgctcacttcggtagaacaatttgttaatatttaagtgtatctagaacctgctctagatgaaaaaatgaatccaaaaagaccgagtagctgatctgctcggcctttttatgcaataatattgttaaaagatatagattttttcaaaggaaataattatgacaaaattaccattcaaagttgttgctgtcgatatggatggcactttcatgcatgatgatcaaactttcgatcacaagcgctttgaccgcatcttaacagaattacacaaaaaggggattcactttatcgtttcaagtgggcgcccttataccagattacgcaaagattttgctggctttttaaaccgaatcgacatgattgctgacaatggctcgcttttgcttcaagataatcaaattattagcactcatttgctcacttataaaacaaccttagatctaataagttttatcaaagagcattattccaagagttcaattattgtcactgggatcaacaattcatatacaactattaatgcttctcctagttttaagcagacgatgaacttctattaccccgatcgaattgaagttactgatttagcagcggctatcaatccgcaggatatgattactaaaatcaccttaagttatcaatatgatttttccgcggaattagaaaaagaattcaaccaaacccatgccgagaagattcactgtacttctagtggtttcggtttgcttgatattgtgccttacagcgttaataaagggagcgctctaaaatacttcttacgctattttggtgctaaacccaatgaattaattgcctttggcgacggaatgaatgatgctgagatgttaaaactagccggttacagttatgcgatggctaatgcagaagatcaagttaagaaaatcgccaagtatgaggccccgagtaacaatgatgatggggttttagaggtgcttgattcatatttagctaaagtagagaaataataattactgtaaactaaaaccgtctgaatgagcaaaataaaaaagtagccaagttttcttaaactaattgacttaagaaaacacagctactttttatttacccaaattaacaaaggtattaaagttcatataatgataatgcacgcgcatatttgatacttcaaacggcgtcccatcatccaagaagaagatcccttccattacaccaacaggttcagtcggcttcaaatttagcttctgctgatcttcttcattcgatggttcaacagtgatattcaagaatgacttagtaacggtctttccctgttcatcttccaaatagttaaacaaagacttttgtaaagtctctggctttaattccggcacaattttaatcggcaaatatccagtctcaattaaaaatggttgttcatctaacagtcgcagacgcttgaattcataaacaaaatcattttcatttaaaaataagtcttccgcaatttctttagttgccttaatcacatgaaaatcaagcaacttaatttgttgttttttaccagggactttaaaagaatcagtgattccaagattcgatccatcataacgaaacattgcctgtttgcgcaaatatagtggattaataaaagttccactacctcgctttttaaaaacgatcccttgttgagccaacagctccagcgcacgcttcattgatgatcgacttacctgatagtgttcggctagactgcgttcatcaggcagtcgcatccccttatactgattattcaaaatattctgtttaatgtcatgcataactgtccgataaacataatctgccattattctcgtccttgatctgcctttttaatactatcaataaaccaagttgcaaacttatccaagtccacatctgtcgcaatctccgcattggcatgttcttggtccataaaatccattacgctggcaccataagtatattgcccgcgcaattcaatattcacatttgcctttttcattgtaaacatttccggatgaagcataattccaactgcagtcggatcataaatcttaattcgcggatcaccgtctggttcatgaatgttagagaaaagtgaatacaacatattacccacttcaccacatgtcttaactttatccatttgctctggtgttaaatgggccttatttccaatttcaagtggagcaaccttaactagcaatccactatgaaaaactacctgcgctgcttccggatctcccgcaatattatattccgcaaatgggctatgatttccgtgaccaatattaccacccataattacaatttccgcaatattttctttaacttcaggatattgcttaaaaagtaaggcaaagtcagttaatggtccaatgcccatcagagttattttttctggactacttttaatttccttagccatcaacgttgcagcaagaccaggttcaattaaagaatcatcagcttgttcaaattcaaagccggcaatccctgttttaccatgaaccgaagcagcactaatcattggtgccaccagtggttgattagcacccactacgacaggaaccttagtatgcaaaaacttttctaaatttaaggtattttgcaaggtatatttcagtgccacgttaccccaagtaggcacaatcatgcgcacatcaagttcttgtgcaaaaagactaatcgtcatggcagcaatgtcatcaatgccaggatcagtactgataattaaaggtttcttgttcataaaattatcctctcgtattaagtacttttataatagcaaaaaaccaaccaattaagaaagtggttggttttattctaataattatttttcttttttgggtttaatacgttgaatgtgttcttcttcatggtcacctaatactaatggcacacgctcaaccacagtatcggcatactccagtccgaaccaagatgcagggttagaagataaattctgcagccatactcttgcttcaaccatgaacttttcatagcctgtcaatttagttaatggactaattacgtcgttaacaattacaaaggcgaagtcccctacatcacgacccggtgtagtagtgaattgttgtggttgagcttcaatcgttccatcagcgatcaaatcatgaacaatttgccgcaaataaacatttacactggtttgttttctaaaacctaaatacaactgaacgttaattacattcttagtaccataagtattgaccgcgtattctgcagtatatggctcgttagtaacattaacagttacaaaccagtaagccttagcccgtttaggtctcttatccaaaattgaataaagcatttcgcgcttaatgaatttattatacttaaccttagccatataaactacattcgtagcgtaaactggataatcatcacagtggctcaactcagtcaacatatctgtatattcatctaagcgaacataagcattctgctcctcacgcttatcacggatcttattgccatagaaccacacgtacatgattgccaaaataaaaccagcaattaaaacagtgacgtaaccgccatgcaaaaacttagttaagcttgagaataagaacatcccttcaataaaggcaaagactactaagaaaatgcatcgtattgatagcgcggtaccttttttacccagatattcaaataataagatagttgtcatcaacatggtaaccgtgatggccagaccatatgctgcttccatatgatgtgaagttctaaataagaaaacaattgcaactgtaatgacacagatcatcttattaattgaaggaatataaatctgtcccttctcatttgaaggatagataatattcattcttggtaaaaattttaaactacttgcttcagctactaaagtgaatgaacccgtaatcaaagcctgagaagcaataatagcggcaatcgtagccaaagcaatagcaaacaatcttagactacttggtactgcttcaaaaaatggattgaaatcaccattaccagcatgataattagcattttgtaaaatccagacgccttgccctaaatagtttaaaatcaagcaaacaaacacataaggccaagagcccataatattacttttcccgacatgtccgacatctgaataaagagcctcagcaccagtagttgccaagaaaattgaacctaaaatcaaaatacccactttattagcaggactaaataaaatacgcaaagcatgaattggattaattgcatcaagcaaactccaatcatggcttaagttcataaatccaatgagccctaaaaaagtaaaccacaggagcatgattggaccaaaggccttaccaatcacactcgttcccattctttgaattgaaaatagtaaaaccaggataacaatagtaatcaagataaccatatcttgcgacgaaactggaattacatcaccaaagcgcatatttttcaatccttcaattgaagttgtaacagtcacagctggagttaatgtcccatcagctaacaatgctgctccaccaattaaagctgggataactagccatttagccctctttctaaccaatgcataaagagagaagatccctccttcaccatgattagtcgccttcaaggcaattatcacatatttgaccgttgtcaataatgtaacagtccaaaaaatcaacgaaatggagccaacaattagttcacggttaacattactaatcccaccattttcagtcacaatcgacttcataacatacaaaggactagtaccaatatcaccatagacaataccgatagcaattaaaaggccagtaaaagacaccttttgcttaccagatattttattcataagtttttatcctctatttcacttaaaaattgaaatttttactagtatagaaaaagtctagattttttgcaataaaaatatatctttttgaaaaataaaaaagaagatgaaatctccttcagtcacttaatttactttttcttatcttcgatggtgccatcactatgagcaataattacttcgtcacacatatccaggaacaagccatgttcaactacgccaacagtatgatcaaggtaatcagctaaaccatgaggtgctggaacaggatctgcagccaaatcaataatataatttccatagtgagtcacataacgttgattgccatccatacgccaccgaggctttaatccttcttgttcaaaacgtttaaagttttgttcacaagaaattggtaaaacttcaactggtaatgggaagccgcttaaacgatgcactaattttgattcatcaacgatccaaatgatcttcttagaattgattgctacatttttttctaaagttaatgcaccaccgccgcctttgattccatccaagttatcggtaacccgatcagcaccatctacagttaaatcagcttgatcaatatcggccaattcactaactttaaagcctaagccctcaagttgttttttactacggttactagtagttacgatagccttcagttttaagccgtcttcatctttgcgcttacctaaagcatcaatgaaaaaggcaacggttgaacctgtaccaacgcccaataccatacctgatttaaccatggcagctgctttttctgctgcttcttttttcaaacgatcttgttcttgcttgttcattattcatcatcctccatcgcctgtttaacttcctgttcagttggaattgaaggctgagcacctaaacgttgtacggcaattgaagatgcacgacttgcaattttagctgcttcttcaaagttagataggccagaatttaaattgcttaccaaatatccaataaaggtatctcctgcaccagtagtatcggctgcttcaactttataagtcggtattaattcttcaacatcgggagttgaaatatacgcacccttatcaccataggtaataaccacgttttttacaccaagcatgtgtagtttttctgcattagtggccagcgttgaattatctttaattgcaatgccagtgatcttggcactttcagtttcattcggtgtaatgatatcagtatattgcagtaattctttaggaatctcatcaactgcaggagctggatttaaaatagtgatttttttggcctttttagcaatcttaaatgcttcaagcgtcacatctagtgggatttcgaattgagcaattacacaatcccaactcttaatcaaatcaccagctgcacggatatcttccactgtcagttcataatttgcgccgtgatcaataatgatgtcattttgcccagcttcattcaacgtgatataagcatggcctgtctttgctcccattgtggtttgcacataagttgtgtccacgccataactcttgagctgatgcgtgataaaatttccttcactatcttcacctacacggttaataaagtaagtttcagctccacttttagcagctgcaattgcctgattagcacccttaccgccaccagcagtagtaatgtctagcgcattaattgtttcaccaggcttaggaaagtcttttacatgtaatgttgtatcaacattacttgaaccaataactacaatcttcttcattatgagcatcctcttctaaaaatggatttattcaacctcaattataacaaaaaacgtattcaaaatattgaacacacatttttgaaatcttactgtaaaataccaccattaacgaagccttttaagcgctcagcttcccacttcaatgtatctgaatcgtcaacttgcgagatcttatacccaacgaaatatggtgaagcatagaatcgtggaataatcttgcaacaagtaccttgaccatcattaattggatagaaaaataagttataagaatcaacaccatgtgacaagactgaacgcacatattgtgtgcccttttgaatcaaatcggcccaagtatccaaattagtattatcatgtgtcaaaatatttacttcttggtagccttgaactggacgcgctgataagttcatttcaactgaacccgaacgcccgacttcaaatcctttaaagttatcagcgccaatatcgtgatagccatctttatgatataagcccacgatctgcatatgtggatgagttaaagaaccatcagacttgggaccaaaatttttataccaaagcacactctgataacggcctgaattattcattttttgaaaacacttcaagccaaacttcatcaactcttgattatcttcacgcgtataagttgaaatatctccctggtgatcacttgattcaattaaaattgtttgattagtatcctttaacgtagggtacttattcttcaaccaaatcttatcgccatctttttcataaatattaattagatgctgcacatcacaaaaaggacagccagcattctgatttccttgccgattaccataatcataatcatatggcttacgcttaccaattgaatattcatacactaaaggattcttgtccatatttttcacctgctaaaccaaagatatcatacatttaacatcattttaacaattttatcggttaattgtgaacatttttattaataaagctaggaatagtacgtctatctatgataaactacctttgtaaaagaaatacatgatatacatgagaggaagaatcatgaaattctataaaaaattggtacttactggtgccgcagctttagctgttctaggcttgagtgcatgttcaaataataattctagttcatcttcatctaataagaagattccaactaagattaacaagaagactaccgttaccttttggtattcactaactggtaatgcgcaaagcagtttgcaaaaattgactaaagattttgaaaagaaaaatcctaacattactatcaagttgcaaagccaaggcggcaactactctgatttacaatctaagttggtttcaggtttgcaatcgccaaaggatttaccgacaattactcaagcttatcctggctggctttacaatgctgccaagaacaatatgcttgttaacctaaccccatacattaacaattctgaaattggctggggctcatatgctaagagtggcattaagaaagctctttgggatggtgcaaacatcaacggtacacaatatggtgttcctttcaacaagtcagttgaagtacttttctacaataagaccttacttgataagtatgatgttaaagtcccaactaacatgagtgaattggcttctgcatccgcaaaaatttaccgtgaaagtcaccacaaagtacgcggtgttggatttgatgctttaaacaattactacatgatgcaaatgaaggaaacttacggcaaagacttcaataagaacttaaactttgctgccaaggattccgttaaagccatcaactactacgctaatggagtaagagccggctacttcatgcaagctggtactgaaaagtacatgtcaactccattcaacaatggtcgcgttgctatgttcatcggttcaactgccaatgaagcttaccttaagcaaggacttaagaagggttacacttatggtgtagctgctcgtccaagcacgatgaacgtacaacaaggtactgacatttatatgttcaaaaaagcaaccgcaatgcaaaagtcagctgcgtttaagtaccttaagttcttaacttctaagtcatcacaactttactgggctaaacaaacaggctacatgccagttaatactgctgctatcaacgacaaggtttaccaatctgccaagaacagcaagataccagcaattattgccaagacctctaagaacctttacttcttaccagtaactaagaatgctactgccgcatatgatcaagttaatgctaacatgcaaaccattttagctaaggcaagtaaaaagcaatcatggaatagcgatatcaagactggtaaagataagcttgatgctgcttggaagcaataatttttcaaataaaatatctatcaaaaaaagaagttcagtattaattgaacttcttttttttacctaattatttactaaaaatggatattgaatttgatcattatcagttacattcaacttgtaacgagcacgatataaagccttttctaccgctaattgccctgcagttgtggccattgcaatcgaatatgacttgtgtggtgaattgatcaggatttgactgatagaatgcttaatgtatgactggattagaatgacataattcgattccttacatgcacgtaaaacattagaagcctgtttcatctcgataattcgagctactccattgtgtgcttcaatcaccttagccaagttagaggttaagctcttgtctcctactacaacggtaactcgttttttatcgaggtcaaaatcaattcgggaagcatagtcttcattttgcttttcagacgactgcttctcctttttttctaattgatgcaataaagacttgtgtctacctttagtcttgtgcttttccgtttctttatttttatccggcttttccttcttttctggaatagtaacttcagcttcggcataacgccatctaaccctaatgaaggatggatcactgactcgccaaacaatactaatcaggtcattttcgtgtaagttaaagtgacttacagtattcatgtctaagtataaaatagctttttcaggatttacttgacttaggtttttgccattagagtcctgcttgatgtataaaccaaaagaatcacggtgaactaccgctggaccaaattcgataatttcctcatctggcgcaaaagactttgcatgatgctcaactttaataattggacgattgccactgtcatttaagtgatctagcaaagtaactgtatcaccgttttccagcttttcaattctagtcaagtgttcattaaaatattgtactgaatgaccattctcatccactgcttctgcacctagcagcttacgcctaatctcatattgtttttcctttggtttagccacaggaattattttcttaaccacaggcttaggaataggagttatggtcgcatatttgtttttattctttaaaaccgtaggactcagagctttagcagcttcttcttttttagctttttctttttcaagctcttccttcgtttttttcggctttattttttctacagtattttcatcattttcttttttagtttctatttcagttttattttctagcttattctcagtttttatttctggctcattttttacagcctgatcagctttttccgcaattttaacgacttcattcttattctcaggtggattgcctagtactgcctggttatatattttactaataattttcaacgcaatcattgactgcttcagtgattggggatcgctccccgtcgcctgcattaaatcaataatatcttttctataatcaatcgtcatatatttaccttcttatttcttaaatatgaatattatacaaaaatttttaatgctaatctaattctttatagatttttatattatttttcctgtaaaaccattataataaaagtagttaaaatatcatttattaaatgagggagactactatgaaaaagaaacttttacttttcgtatcctttttagccggtttattgttcttggtatctacaccaacttatgctagcaagcttcctaaaggctatggtattgctaaaacctttaccacaccaaaagcaacccgtggcacctggtattatcgcgaaaagggtgataaaacaatttctaaggtaaagatcactgctcatagcgtagatggtaaaaagctttacgtaccttcacaaaagttcttcgagaaaaatgtttacaacgtttcagctaagaagcgtaatcagttcatcaaaaaaactgaaaatatttatgctgcagctaactataaaaagggcttcaatgtcaacaattgggttaacttagctggtgatggtgaatactacatccctgttactagaactgttaacggcaaaaaggttaaggcattaagaatagctactggtgctggtccttatactgctgcatatgcatacaaaactaaggcattggttaaataatcattgtctaacgaaaaagcaaattagcataatttgcttttttcttttaccgatttttacttttccgtatttctccttcaaaaagagcggtcaattttgccaaactcttatgatcaggatagcgttgaactaattgctcaattttatcggtagctaatttttttacttcttcggctgagcccattttctctaaaaaatctgccaaatcacctgaacgagcaagtaacttacgctcactacgactttctgccagaaaagcttgatcaaccttacgtaacttcaaactaccatctgcattaaagtgatatcctccccacatatgctgcttaattggttgcatcggttcgctatccacataacacaattttcctaccatatggtgcgtctcagtaattcctaacgtaaccgggtcataaatatcgacatagttaaaaattttctcccgcattttagccacctgacgtcgttctgttggcgttaataaaagccaaatattggttccttcatacagataagcagctgcaattgcttctggatgacgacaattagctaaagcaaactgagcattaattgaacctaacgaatgaccataaatataaattctactacctttaaattgattaattgtctgattcaataagtgagcagctgactttaattggctaggaatcgtccgttttcgtgcaagcagtgcttttaaaattggtagattagttttaatccattcatcacgccaagtttgtggagtcccctttttaaaaccatatgatcctttaaataagattgttatttcattcggacttgaaatgacgaaggctcgcatcccatccttagcataaacattacgacaaacagttccaagataatgttgatctattttgatagtatcacccagctgcaattcatcatatgtctttttagttaattcaactcgttcacgatctgttaactgtgcatttacactcataatttttcctaaaataaaaaactaactcttactattatgttagcatgagttagtttttttggataatttgagcctttaatcatattttttctgcaagtaatttgcaatcgttgacaagcagaaacagacaataaagtacatgattgcaataatcacatacattggaattaagtaagtcgtgttctgactgtaaataatttgtgcgtggtataaaagctctggcaaaacaatgatagttgccaatgaagtatccttaaccaatgatacaaattgtgataataatgccggaatcatattgtgcaaagcttgtggcataattacatgatacatagcctgaccatacgacatcccgttggaacgggcaccttccatttgacccgaatcaactgagccaattcctgaacgaacaatttctgctagcattgcaccttcaaagatgactaacgctgcaattgaagctgtcgttggattcgttacaatacctaattgaggtaaaccaaaataggtaaagaagatgatcaacaatagcggcaagtttcgaataatatcaataataaagcctacaattgcagacacatacttaattttcatgtagcgaactaatcctaagattaatcctactacgaagcttaatgcaattgaaattaatgaaacataaatcgttacccaaagtccttgtaataagaagcgaatatcgacccatgaatatgcatgaataaaagtttccattctctatccccttcctattagctgactaattttttctctaaatgacgcatgtagtaactaagcggcaaagtcaagatcaagtagaacaatccaacaataatataagtatcaattgtttggaacgttgagaacgcaatcaattgtgcttgatacatcaagtcaaaaccggcaacaaaggccaaaactgaagagtttttaaccaagttgacaaactggttgcctagtggtggaatcactatcttcatcgcttgaggtaagatgacataacgcatggcttgcacataggtcataccgttggagcgagcaccttccatttgaccagttccaattgaattaattcccgcacgaacagtctctgcaataaacgctgatgtataaagcgttaaaccaattgtccccgcttgaaatcctgacaatttcacaatataacgtggaacgatcaaataaaagatcatgacaattaccagcaaaggtatatttctaaaaatcgcaatatagatcttcgcgatcacttggccaaatttagatggtgctacctcaagcaaggcaaaaatcacgcctaaaatcaaactgaaaactagagcaataatactacttaaaatagtattccaaaaacctgttaggaagctgccccagttgttagtaataatttgccacattatttcaaaaccccctttagactaaaaccaggaattccagcaaaccactttttaatcaaacggtcataagtaccattcttttgtaattcattcaaagcttggtcgatatgatcagccatttgtttttgtcccttattaacagcaattccgtaaggagcattactatagacgccgccgactaacttataaccaggattttcttgagcgataccggcaagcaagccgttgtcagtagttaatgccacaccttggttagccttcaatgcagacattgcttgaccatagtcatcatattgcaaaatccgcgctttaggggcatacttatgtacatcatcaactgcggtagttcctttaacggccaaaacagttttgccttccagatccttaacattcttgatcttactattattaggcactaacaaagatgaaccggctggaaagtatggcttagagaaggttacttgcttggcacgttctggtgtaatagtcattgtggctaaaacagcatcaacatttccattttttaaaagtgggattctagtgttggcagtagtagtaacaaaatcggttttagcatctttacctagcatttgcttagttaaagccttagccaaatcgatttcaaacccttcaatatgtcctgtcttaatgttcgttaagccaaacaatctagtatctgctctaacgccccaaacaattgtcttactttcttttactttttgataaacattattgctagcatgcttgccacaagcagtcaaggcaagtgccaagattagcaataagggaaagaaaaaaaatctttttaattttttcatggcgtgccaccttaatctttagaaatgatcttgcttaagaattgacgtgcacgttcagtatctggatgagcaaagaattcttctggcttgcgatcttctaaaatatgacctttatcaaagaaaattaagcgattgcttacttctctagcaaaacccatttcgtgggtaaccacaaccatagtaatgccttgttcagcaacatatctcataacttctaaaacatcttcaatcatttctgggtcaagggcactagttggttcatcaaataaaatcaccttagggtgcattgctaatgatctagcaatcgctactctttgtttttgtccaccagataattgatgaggataagagtcaattttatcggccatacctactttttcaagatattgcatcgctactttacggttctcatcatcaggacgctttagcacaatcttaggcgccagcataacgttctctaacacagtgtgattattgtagagattaaagtgttggaataccatcccaacatttttacgaatcttattaatatcggtctttttatcagccaaatcatacccagttacaattaattgaccgctattaattggttccaagccattcatagttctaattaaagtactcttacctgaaccagatggaccaataattgaaaccacttggccttcatcaatctttaagttaatatctttcaatgcatggagctttccatagtacttatcaacatgcttaaattcaataattgctgtcatggcttctacctttctttcctttgtctacacaatataattattttactcttcttaaagctaaaactaaatattttagcaattcaaaatagtataatagcctgctaatcttataaatttgttcggttttagcaaaatatatttgtatttagctagattaaaataatcatattaacgctacttacgaatttattaactactaactttcaggataaagaaaaagcccatcatcccctctagtttgggacgaaaggcttttttccgcggtaccacccacattgtctaagtatagaccaactcatgaagcaccgacatgcttcaccggcgtggtaacgtaccggagacgtctcgacctactataagaattgttagttcggtgagctgctaaaagtgtttttcaatagttcagggtctgctggcttttcactaacaccaactcactgctaagaataaactacctactcgtctttttcatagccttttaatttatttatatgtatttaacattatttttcaagaaaatgcaagggaaaataatttaaatcgcaaatgtatccgtttttaattaaaataaatgctgttaatattcggaaaatagcttagaatattagtgatacctagaaaattaaaggagtttgatatgggaaagcttgaaaaacccgttattattggaattgctggtggttctggtagtgtgaaaacaacaatcgcacacgaaattgccgataacatcgatgatcaagatcgaattatgatcatgacgcaggattcttactacaaagacaatactggcgtatcaatggaagaaagaatgaagatcaactacgatcatcctgatgctttcgatatgccactacttgaggcacaattaaatcaattgatgcacagaaagccaattgaaatgccaacttatgacttcactgctcatcccgtagtgatgaaactattcacgtcgaaccagctgatatcattattctagaaggaattttggtactctttaacgaagatatccgcaatttaatggacatcaaggtttacgttgatactgatgatgatatccgttttattcgtcgacttgaacgtgatatgaaagaacgcggccgctcacttgattcagttattaatcaatacttgggcacggttaagccaatgtacaatcaatttattgaaccaaccaagcgttacgccgacatcatcgttcctgaaggcggcgaaaacgatgtggctatcgatatgttaactactaagttgcaatcagttttaagtgaataattatcgagatataacaaacaggcaagctaggaataatacctaacttgcctattttaatactctaaattatcttagtttttcttatcatcctgtgcattagctgcatccaaaatacggttatatttcttagcaaagaataccaaaagcaaaacactggcaataacataaataaccgctgcaatgtagtaagcattagcataaccatcttgcgtattaaacaagtaaaattcagtgaagagaccatcaataactccaacgatagcataggcaatttgaactacaccagtaaaggctggacgcaagtccttgtcaacaataaccatctgaacttcttgctgaatcggcatcgtggcattggctaaacctgttctcaagaaaagcagaattgcgacaatgacgaataagaaggctccgctacctaaccggcgaccattagctaacaaaagcataaccggtacacaagttaatgtacctgcagcaaccgacacgattgcaccgagtttcttttccaaaaatggagcaaagaagtaaccaattagcattgctgcttgaacaaaagtgttgatggtagaagtaacatcacgtggaatgtgcaaataactattcaaataaattggcacataaacggcaactaaacgagcaccaagttggataccggcaatataaacaatccacatcaatgtcttcttgctcaaaagcttcttatacatggccaccttttcaactctgctaggttctttatcatctgcagtagaacgatagtcacgtggtacatcgtgaataaatagggctaagataaaggctaacatcgttacagcagctgtaatataaagtaaaattctgtatgaatttgtatagtcagctaaagtttggccggttaacatttcagaattacctgatagaactgaagcttcgtgataaggaatccctctaattaagccaaagaaccaaacaacagccttcccacctaagaaagtacaaattgtctgcgtaatcaagttaacaatcataacggttgagaacatcttagttctaatcttccctggaacatatgaagtccacatcagtggatacatcaaatcataaaccccaattgctgtccaagaaatagtataagcgatcatgatgataatttgattggttgtgatacaggttaaggccataaaaattgccgtcattggtggcaagatcagcaaaatctttcgatagccccatttatgaaccgtcgcaatcatgactgacatcaaaattgctgtcgccgcattaaaaatgtttaaacctgaaatcaagtgtggcgctacaatcttgtagtaagacaaggctgcatcattcgtaatccctgttactgcacctaaaataccataaatccataagtagacaatgacattgtgtttataacgtggattccaatttttaatcgcctcatcctcagcttccttttccgcattgcttcgtcgagccatataagtccccttccccttttatgaaaacgtatacaaatatctaatttaatcttagcacctatatagtattaataaagtgtgtgtatacgaaaaggtattgattatatgacttaggcaagccttggctttaatgctttatcaaatagattagtaatcaattttactagtacaccatcaaatactaatgatgaaatcatgctgacaataaacatcaaaatttggacattaatttgatagtgactccaaccaaataagaagtagctgggaataaagccacccaaattagcaaaaaaggcaccggtcaagacacttttccaagagaatctttcataacgttcctttttagggaaaaagccaatttcattcattgccccctgaattaatccttcaaaaattgtcaaagctccccattgtccgccgatcgccatttctacagtcgcagccaataattcaccgattgttcctgcacccttagtcggtacaaaatacattgctagtggtgccgccatgtaccataatcctgtaaaaatattatccactactggtgcataacccgtgggcaaaaaactcaatttcaccaagttatacacattattaaaaccataagtgtaaatcacgcccatgattattccaattaaagccactaaaataattgactttacattccattttgacgatctagtaaacataaaaatgctccttactaacatactgtcagtaggagcacacaaataaaagttaattctcttgttagcactttcccttgcgcaagtattatcttgttcaggttcgaagggtattatctcagcattacgcacccctagtgacatttcatttatttatcaattaagtcaagtatagcacattgttaatcaaatgccatttgatctgtgtaaagtttgtaataaaatcccttttctttaagcagtgcctcgtggctgccttcttcgatcacattaccatcttttaacacaacaatcttattagaattcaagatcgtctttaaccggtgagcaatcacaaagcttgttcgtccagcaatcacagtatccattgccttttgaatcttttcttctgttaccgtatctacgttagaagttgcttcatccaagattaggaatggtggattcgttaaaattgtccgagcaattgacattaattgcttttgtccagttgaaaagattgagctagcatcgctaacttgagtatcgtaaccatcaggcaaagtctcaataaaatcatggatattagcctgcttagccgctgagatcacttcatccattgaagcattcggcttaccataacgaatattgtccgctacagtaccagtaaataagacagagtcctgcaggacgatcccaacattatttcgcaatgatgttagttgaatatcacgtacatctgtcccatcaaaggttactttacctgaattaacatcatagaagcgatttaacaggttcataatcgtagttttacctgaaccggttggtccgaccagagccactgattggcccttatcaaccgaaatatttactccgtgcaaaatttctttatctttattgtagccaaaatgaacattttctagcttgacaccatgattcaaaccactaatgaccttaccatttggcacttcgttttcatctttttgttcttcaactgtagctaatcttcttgccccagttaaagctaattgaatcatggaataaattgaagtaatttgcgtcaaaggttggaaataaacttgtgaatattcaacgaaagttacaatcaagcccaatccaatagcctgagaaatttgaccggaaataatcatccaagaccccatagcgatgacaattgccaaattaagtaagttcaatccgttcatcaatgggaataggattcccgaataaaattgccccttaaacaaagcgattcttactttattgttgtagaccttgaagccatcaaccgattcttgacgcaaaccattggtaataatcaccttttcaccattgatctgttcggtaatataaccatttaaatcgccaatttcatcttgctgcttatcgatataaacgcgagcttttttcattaaaaggacactaataatcaaaatgaatggtgttgtcgcaatcgtagtccaagccaaagtactattaatcgtgaacatcacaataattgttcccacgaacataattccctgggaaataatttcaaaaatcgcattgttcattgcgttgaaaatattatcccaatcggaagtaagtagcgataaaagtttaccatcctgatgagtatcaaagtagcgcactaacatccgttgaaacttggcaaatagattctcacgcatgtcattagttgaatccgcattgaacttggacattaccatccaagcaataaaaatcgctatctggctcaataagtaaaacaagaacatcgaccataacgcgctatagaacgtgttcatggatgctgtacccttttttaaatcaaccaaataagtagttaaagcagtaactgaacggcctaaatatgtaggtgccataacctgtgcaccactcgaaatcagagaaaggataactacaatagtgattcccttccaataaggcttcaaatacttagcaaaatagcgcaatgcctttttcgtattactcatttattcatttcctcctttcttacctttttgtgtcttgaagatttcttggtaaaccagcgaagtcttaagcaattcttcatgcgtaccttgtgccactaatttaccgtcatctaacactaaaattgtatcggcattaatcactgaaacaatcttttccgcaataataaaagtagtagtatcaggcagctcatgctctaaagcttgctgtactttcttctcactttccgcatccagagcagaagttgaatcgtccaaaattaaaattggtgctttagcaatcaagccacgtgcaatagatagacgttgcttttgcccaccggaaaagttagcagaacgctcctctacttcatgatcgaaagaatcgttataacgctcaataaattctgatgcttgcgccatattggcagcacgctgcaattcatgtaatttagcctgagcattaccttgacgcaaattagatgctattgtacctgagaaaagaactgctcgctgcaacacaaaagaaacagttttgcgtaatgcagcttcagttacatccttaatattttgaccgccaatttttactttacccttagttggatcatataaacgagcaattaattgggccaaagttgatttaccagcacctgttgccccaacgataccaaccatttgacctggcttaatcttaaacgaaatatcctttaaagtaggatcatccccatcaggataagtaaaggaaacatgatcaaactctacgctaccgctaagaggtgcaaccgaaccactttccacaaacttgacatctggttcagtctccaatacctcacgaatacgtccaagagaaatattagctcttgaaaattgcattaaggtcattccggcaatcatgatcgtaaatagcagggttaaaacatagttcacgaatggactgactaccgcaatatcacttggatgtgccgtaatatttttaccaattaaataaacaattaaagcaattacggtataagcgatcatctgaaaagctggcataattgcagagaaccagtaaccaatcacaatgttgtagtcattcaattggtccgaagtttgatcaaactttttaatttcttgtggaccttgattaaatgacttaaccactctcacaccttgcaatgtttcttgtgcttgattagaaattcggtccatcatttcttggaatttggtaaacaaactattcatttgtcttaaaacgtaagcgccaaaaccaaaaataagtgcaaccatgaccactggtgcccaccagaagcgcggaataatcacgatacagaagataaatgaaccgacaattaaaatcggcaaccgcaacatctgcataaatagctgcatcatcatgttcattacctggttcatatcgttgatcaaccgtgtagttagagaacctgctgaaaatttcttaatattaccaaaagagaacgtttgaatcttagcataggtatcttcacgtagatcactaactactccttgtgcaattttcgctgcaaaataaacgttaaaaatacccgaaataattgcaattatacctaggactactagccagattccatcagacaagactgcttgcttctgattcgccatcaatgccttttgaatattttccaataatttaggctgatataatccagaaaacgctgaaactaagatagcaataattgcacaaacaacatcttttttataacgctttaagtatggaagaattattttaaagttttccatttttactcctttcttcacttaaaaaatgccaaaaagtagtgctccattcttctgaaagcttagctaacaatttcattttgtcagttcccatggcttgagccgttttttcctctaactcaaatagaggacgcaacctgtcataagcatatttccgccctgcttcggtaagctggcaaaatcgaactcgcttatcgctaggatcaacagtcatcgtgatatgatcatgatcacgcagaatcttaattcctttgttaatcgactgcttgggtaaatcactcagatttactaattctctttgtgtcaattttccccgaatcagtaattcatacatgattaccactaaatagtcaggcaagtcatgatcctgctcccattggctataagcacggctgccatggataattgatagatttaatttttctgtctcactaattttcattacttcaccaccatatttagtctacatgcataccaaatatattagtatgcacatggactattgtcaaatcattttgtcaaaaataagactataattaaagtaaagaaacaatttttgcatctaaatttcaaattggtataataaaaaaatcatcaagtaaaacaaggcagggattatatgcgtaaaaagtttttattaataatttcaatagtggtcctgtttgctttgccattaagtggctgtaagcaaaacaaaaagcaaaacgtttatcaagcagttaaaactagtaaaaccattaactggggcgtcaaagccgacacgccattattcggctcaataaatattaaaacaggcaaacttaatggctttgaaattgatttagctaatgcattaacccatgaaatgctaggcaaaaatgtcaaagccaatttcataacaacaacggccaacaccaagattcagcttctaaaaaacacgaatgtcgacgccgtcattgcagcaatgaccattacgcctgaacgtaaaaaacaagtcgaattcagtcacccttactttcctgctggacagtcaattatggttgctgacagtagcgccattaaaaatgctaaaaatttgaataacaagaaagtgcttgtagttaaaggaactactgccgccgatgctatccatcaagttgctcctaaagcggaaattttacaattcgatgattacggccaagcttttgccgcattaaaagctggacaaggagatgcctttgtaactgataacggaattttagctgggattttgcgtgatagttccggctataaattagttggcggcacctttaccaaccagccatatggtattgcagttaataaggggcaaaatgacatgctcaagcatatcaacactgcattagcaaaactagaaaagaatggcacatataatcacctagttaaaaaatggtttggcaacattcctggtatgaacattaaagaactagaaaagaagtaagaaaaaggctaagatcaaaattttgatcctagccttttcgcttatttagcaatgaaatcaagtaaagtaaacattacatctttatttttctcaggcacaccatgattaataatctctgtaggcgtttgatgtaaatccttattttctaaagcatatgctccatcattaatagcaatctcacgtacattatcaatttgcggttcaaagtggaactgcaacccaattacattatctcccagtaaaaagccttgattcttaactagatcactagagaataataacttagcttcggttggaatttcactcatttgttcatgccaatgaagagctgttaacttatccggaattcctgtaatagtctgatcttgcaaataaactggtgcccaacctacttccttagcgggtgcatcaagtaccttatagcccaaagttttagcaatctgctggctaccaaaacaaattcccaagatcggcttgtgttgatctaacatttgtctaatcaacacacgttcatttttgacccaatcaagatcatcattaggactgtttggactgcctaggactactaatagatctgtttcatcaacagttggcaaaataccaaaattccctggatggtaaacgaacatttcgttatctctagcatggcaccaggcttgaatagaaccaggtccctcattaggtgcatgctgtaatacattaacgcgcataaaatccctttctcactcaacaatatttttgtttttcattttatactcaattctagtggtaaacaagaagaattcagttaatcttttactatatctttagaaactatatgtcaccttatatgatataatgttatacatatttttacatctggaggacttttatggacaatcaccttaaacgcagtattggcttaggttctgcactttcaattatcgttggaaccattatcggttctggaattttctttaaacaagcttcagttttagatagcgcaggctcaacctttatggcacttttagcatggattttagctgggattatcacattaaccgccggcttaacgattgcggaaatcggtgcccagatgccttatactggtggactttacgtctatattgaaaaaatttacggccgcgttttaggttttatggctggttggatgcaggctattgtgtacggtcctgctatgatagctgcagttaccggttttttaagtattatggtgactaatctctttggcatcggcaccgaatggcgtattcccattggtttgatcactatcatcgctatcggtggtttaaactttttagaaaataaagtcggtgcagcctttgctataatcactacaattgctaagatgatccctatttttgcaattatcttctgcggcatctgctggggtgagcaaaacgctgtcgcccaaactgtgactgagctgaatcgatcaacaggtggtcttggcgtagccgttctcgctgccctttttgcctatgacggttggatctttattgctaacttaggtggcgaaattaagaatccacaaaaattattacccaaagcaatcatcattggaatcactacagtattagtaatttacgcgttaattactattggtatttttagtttcatccctgccgataaaattcatgcattaggtaaaaattcaaccacttatttggctgacgctattcttggtccaattggcggtaaagttctatctgtcggcattattatctcaatgctaggcactctcaatggagaaatgctcacctttcctcgtattatttacgctatggctaagcgcggggatttgcctttctcaagatttttatcatacgttacacctaagggaaaagcaccagtcattgccactatgctcttaattaccttaactggaattatgatgactttcttcgatcctgattacctatcaaatctctgcgtcttcacaatttatagtttctatgttttagcattctttggcttattcattttaagatacaaaaataaggaccaacgtcctttcagcgtaccgttttatcccctaattcctttagtagcaattgcgggcgggctcttcgttttagtcagccaattcttcaatgatcccgctggcgttttgctttttactggaattaccgctgtcggctggccaattttctttttagttaaaaagatgagcaaagcacagaacacgattatcgaagactaaaaatctcaaatttttcttgttcatttttaataattatgatattctaattaaaattaatttaggagattcaattatgatttatcaagacaccacattggcatactcatctagctcaagttccaactgaacttgagtgattttggtgtacgtaaatcagcagccggattcactcaatcgtttctagacgataaggtgaatccggctatttttgtataaaggagaaaaaatggacaacaagcttaaacgcagtattggtttcggctcagctttttcaattgtaatcggaactatcatcggctctggtatcttttttaagcaggcttctgttcttgacagtgcaggttcaactacaatggccttactagcttggatttttggtggtctaattaccttggctgcaggtctcaccattgccgagatagggggcgcaaatgccctacactggtggtctttatgtctacattgaaaatctctatggccgcattttaggctttatggctggttggatgcagatcatcgtgtacggtcctgcaattattgccgccgttgctggttttatgagcatcatgatgactaacttttttggtttgaatcattcatggcgcattcctttggctttaatcacagttttagcaattggaatcatgaatttcttcgaaaataaggtaggtgcaatcttttcagtcataaccacgattgccaaaatgattccgattgctgtaatcaccatttgtggaatctgttggggtcaacaagatgcgattaaccagactgtagcagaggttagccaacacactagtaacttcggtgttgctgtcttagcaactttatttggttacgacggttggattttaatcgctaatttaggcggcgaaatgaaaaatccccaaaaattattacctcgagcaatcattgcaggaattacagctgttttggctatttataccctaattacaattgggattttccgcttcatccccgctaatcaaattcaccaactaggcgaaaacactactacttatctagctaacgcggttttcggtgcaatcggaggtaaaattctttccattggcatcatcatttcaatgatgggaacattaaatggaaaaatgctgacctttcctagaatcgtttatgccatggctaaacgaggagatctacctttttctaaatacttagcctatgttactcctaaaggaaagtcacccgttgtggctactttatttattgtccttttagcccttttaatgatgattttctttgatccagaccacttatcagatctttgcgtctttacagtttattgcttctatcttttagccttctttggaatttttatcctaagcaaaaagaataaagcagagcgtcctttcagtactccactttatccttttgtgcctataattgctattttaggcggtttatttgttttaatcagtgaattaattaatgatccagctggtgttttgctttttgctggaattgtcattatcggcttaccgatcttctacgccgttaaacgcatgaataaacatcgcttgtattaaagcgacttttctacactgtagcttgcacgccacaattcttccattttagctaaacgatgccaatctcctttttgacacattgtatacaaggcatgagcaggatcataagcaattggattgccctctgcttcttttaaataagccccaacaatgctgattaacatcatccgaaagcgttcaatctcattacggctaaagtaagtttcaaaatacttagttactaagcaatcaaccgttgcatgcgaagctttgcgcaaagaagcaggattcttacgatagttatacaaagtataagttgaaattccagttgctttacttaaactagtaatcttaacattacggtcagttattagtttctctgctctttgtacatcggttaaaattttgggatgcttaaagtgagctggcattgggatacgtttacttaattctgcaattaccttttcaacagcttccttcatttgctgcgtagctacttcttcgtttaccttgtcattaagcaattttcctactacaaacgtatgatcagtcacttcataccttttagtaactgcattgtaaaaataaccttcaatacctgtaatcttaactgcatcagttccagcttttgcatagtcaaaaaagatgtgttgctgatcaccagttaatggtgaaaatggcaaattatctagcgtaaaaacttgtacatttaaagtataatctgaatgagcgggatcatctgcatcacaatgatacatcttcacttcccgatcatgaataaaatcttcaaaaataagattttttccatattttttcttcatttcttaatccccttttatatagtcctattatctattataatagagtagagggagttttataactcgcccctctcattgcaccggacgtacggttccgtatccggcgctacgtttgtgattatttacgagataaataatattctagcggatcgaccaagcctgggcgatccgctttgcttatgcccaatacttttgggctaagcagaaagttaatgacatgacccgtacttcttttataccaacctaagcgcgtattagctactttatgaatatcttcatcactaaaattgcactttagtgccttgttaatccgcattaagttaatgtatattcgttttggtagtttccattgtttaatgattaccacccgtactttatgacgcagccattgactgaacttaattagaaaatatttcatgtcgccaactctaaagtaattgacccagcctctaactacttgatttatcttagtaaagactagtgatagaggctgagcagctgcttttctgcgacagagaagttctctcatcttgtcataaagcttgattttgcggtcatctcctggctttgcttgccagtattcgccacttttccagaaggtaaagccaagaaagttgctcttggttggtcgtacaactttggttttggttgcgttgacctttaggaatagctttctttctagccatgatgaaattgaattcatcacacgtttggctgatttaccgcttttgacaaagatattgcagtcatcggcatagcggacaaagcgcaggcctctttgttccaattctttatccattttatctaaatagatattggatagaattggtgaaagagggccgccttgtggtacacctagtttattaggcttaacccaaccatcttccattactccagctttaagaaaggctcgaattaaatggagggtggttttgtcatttacttgctctctaattattgaaattaatttatcatgatttaccgtgtcaaagtatttctcaatatccaggtcaacaacccattgatagccttcgtttaaatattccaagacttgttcaatagcgtcatgagcactgcgtccaggtctaaagccatagctatgctcactaaaatgaggatcatagatcttcattaatacttgggcaatagcctgctggattactcggtcaacaaccgtgggtattcctaaaggacgtttcttaccattagctttaggaatgtagactctgcgaacagcttgcggacgatacttcatcttcatgatggcgtcctttatttctacttgatgctttttaaaatagctatcaagctcatcaactgttctcctgtctacaccaggcgctcccttattgattttgactctcctgattgcttccttgagattgttttgacttaaaatctgttcaattagttccatctcgtgatatctccatttctacttgtaaatttattcagaattgtcccaattgctttcaccatcaaagagttacgttctctttgtgctaggctatcctcttatccggactgtctgaacattgcttatagcgagatatgctcttacaaacattaggcccttcgctccagtttcattacaaaaccttcagcactactacgacctcagctgacttctcgcgattaacctttttcgaccaggcttacgatcgctgatattaaagcttactcggtttcacctgtccacgagatctctcggggtaagacattcatctttaattttccactgccccctggtttaccgtcttggttttacggttgtcctttggactttaacttgtgctgcagtctcatccaccatttggcctgaccaggtttctgtacgtaggctcggaaaactcgctagccacttccttcacccatagcgtcaccgctaacggcttgtggttcgctacacttggcgacaactacccgtgatctagactttcactagactaaacaaatgccatgcccgacacacagcaaaaaactagcttttaaaagctagtttttgtttttattagaaaatattcggtttagggcaaataattaccagcagctaagtataaatcgtaccactcttgtctagtcaatcgaatcttggcacctttagcagaatccctaatgtgttgcggattcattgatccaactagcatttgaatatttgcaggatgacgtaaaatccaagctgcagcgatcgcatttttacctacctcatacttatcggccagtttttgcaactcttgattcaacttggggaagccatcattatcaatgaaagtcccttcaaacatgccatactggaatggtgaccaagcctgcacagtaactttgtgtagacgggcataatcaagaaattggctatcacgatcaactgatggtttatctaccatattcatatgcatcccaaagtcaatcattcctgtatgtttcaggctaaattgtaattgattgaacatcaagcgctggctcaagcaactttgtaacaatttaaattgagccgtatcaaaattagatacgccgaaaaagcgcaccttacctgctgcctgtagttgatcaaaagcctcagctacttcttctggatccatcaatgcatctggtcggtgaagtactaatgaatcaagataatctagttgcattctttccaaaatttcatcaacactatgcaaaatatgttctttagaaaaatcataacgttttcctggaacaattcctgttttagattgaataaacatctcttcacgcttgatctgcatttggctaaaagcttgaccaaaaatctcttctgattttccaccgccataaatatcagcagaatcaatgaagttgatcccagcatcataggcggcttgaattgccacttgagcctctggaactgatttttgattcattcgcataatgccaagtgccatcgctggaatgcttaaagtagtacatcccattttaattcgtttcataatgtaagtcctttcattctttatttacctcacatcatgaaccaaaaatagctaagtttcaaccacaagaaattcaataatcttttattaatatatcttagctactgccgattgaattgattctttatctaagaattcgtcataacttgtatcttggcgactaacaatacctttaggtccaacttcgataatgtggttagcaatagtttgaataaattcatgatcatgtgacgtgaataaaattgaacctggatatgaaacaagggcatcatttaatgcagtgattgactcaagatctaaatgattagtaggatcatccatgatcaatacattagccggttcaagcatcatacgtgacaattgacaacgaaccttttccccaccagaaagtactttgatcttcttctcaatttcttctccactaaagagcattcgacccaagaacccacgcaagaaagtattatcatcttgttccttagtcgcatattgccgtagccaatctaagattgtaagttcatcattattaaagttagcgttcaaatcgcgtgacatgtagttaaaggccgttgtttgaccccatgtaacggtaccagtatctggcttaagtttaccagcaacgatatcaagcagcgcagtcgttgctaaagcgttacgcgataaaaatgctaccttatcaccaggacgcacgatgaaagacacattatccagaatcttttcaccgtcaaccgaataagaaacgttctccaccttaactagatcattccctaagtcacggtgcatttcaaactttacaaatggatatttacgactcgatggtttaatatcgtccaaggtaattttatcaagttgtttctttcgagaagttgcctgacgtgatttagatgcattggcagaaaagcgggcaataaattcttgtaattgcttcatcttttcttcttttttagcattttggttagcagctaattcattagctagcttgcttgattcataccaaaagtcatagttacccacataaagctgaatcttaccacgatcaacgtcacacatttcagtacatacttgatttaaaaagtgtcggtcgtgggaaacaacaatcacaatgttagggtaatcagccaaaaagtcttctaaccattcaacggtatgaacatccaaaccgttagtcggttcgtccaatagcaaaatatcaggattaccaaacaaagcttgggccaataagaccttaactttttcgctttcaggtaaatccttcatcatcatttgatgttcttcttcaggaatccctaatgattgcagcagcttagccgcatccgcttccgcattccaaccatcaagttctgcgaacttgctctctaattcagctgccttaaccccatcttcatcaccaaagtcaggtttggcataaagagcatctttttctttcattacttgatacagttccttgtgcccttgaattactgtgtccatgacagtgaagtcttcgaaagcaaagtggtcctggttcaagctggacatgcgctcattgggatcaattgaaattgaacctgttgttggttccagtttcccctctaacaatttaagaaaagttgacttaccggcaccattggcaccaattacgccgtagcagttgcctggagtaaattttaagttaacgtcttcatagagtgtgcggccaccaaatcgtaaactaacgtcggatactgtaatcaatctctttacctcgcttaaaatataaaattatgtttaagtatatcaaaaaagatggtcccttataatagagaatccatctttttaagcaatttattaaaactttttgaagctatctagcttttcctgggtaatatcacgaataattgcagtagctaaatcaactgaagccttaaagtccttataactactgaaacaatatggtgaatgttcatagcgcaccggaataccgatgacaattgttggcgcaccattttcgtagtaaattgcagcaccatcctgaccgccaccggttctaaccgaacgagtatatggaatattatttttatcagctaaatcacatgcatattgttggaacttaggatttggtaaaaatgtcgtatccatatcgcgcaacattgggccacgttttagaccagtttgagaaagccagtcaggcgtaaaagtatcatcagctggacagctttcgagtaccagacaaagatctggcttaacttttctagccgttacataggcgccacgcaagccaacttcttcttgactagaaagtgcagccactacgtcaaagttagtttcttcacccttcaaattatcaagcacatcaaccatcgcaccagcaccaaaacgatcatcaaagtctttaccgaagaataaaccggacttttcatgatattcgcatttaacatcaacaaagatagggcaacctgtatcaatcttgtagtccttgattgtctcctcacggctagaagaaccaacatcaattgacatatctgccacatcaggtacactattgcgctcagctgctgtcatgaagtgaggcggcttagttgctacaacgccagggatatattctccatcacgattgcgcactttaacgcgcaaggctggaatattatattttacccaaccaccaagtggaacaaacttaattaaaccattagggcgaacagcttgcgtaatgaagcctacagcatctgagtgcgcatcaagttgaattaccggtcgatttcccttattttctttcttggcggccccggatttaaaattgaagtgcaacactaagtgttaaacaaaaaggccatgaagacctaaacttgaagtgacgaaaaatcaagaaaggaagatcttcatgaccaattcaaattctagcatttctaagcactatcatcaattaaccagcgtacaacgtggacaaattcaagcaatgctggattccggcataacttcccgtactgttatcgctcaagaagttggctgccataagtcgacaatcagtcgcgaaatcaaacgcggaagcgtcctgcaaagagacagcagctatttattgtatgagcactattacgctgatactgcacagatttattatgagaagcgtcgcaaaaactgctatcagcgcaatccattgaagcattatgctgtctttttgagaatgctctccagacgctttaaagctaaatttgatgccaccagcatcgatgagttcgttggtgaattcaaaaggactatgccaggctacccttgtcccagcacaccaaccgtctatcgctatattgatcagggcttgctggacataagcaatattgatctgcctatgaagctcaaaagacgcaggaacaagcgtcatcacagccatggcggtcacgctttgcacaagaagcatcttggcaattccattgaacagcgtcctaaagagattgaagacagaaaagctccgctgcactgggaaggagatctggttaaaggcgtcagacgcaagaatcagcctgctttaatgactttgactgaaagaaccacacgctttgaagtagttatcaagattcctgactatcgggcaagcacatgccaaaggctgcttcaaaaggagattgacagacatcctgcctggtttaaatcaatcacgtttgacaatggctctgagtttgcggatatgaccaagatcaagggctgccagatttactttgctcacccatattctccatgggaaaggggcaccaatgagaactgcaatggtcttttgcgtcaattcttccctaagagcaagagcatgaaagacaagtcaaaagcttatgttcaacaggcaactgatgccattaaccacaaatatcgccgaatcctccaatatcacacagcagaggaactcttcaagcaatatatctcttcataacctaactgttgcacttaatttgacaattcaggaattatttattttaagaatgttacaaggtatttttgcaggctttgtttctaattccaatgctctagttgcgactgaaactccgaaggaaaaatctggacaagcacttggcactatggcgtctagctttactgctggcaacttactcgggccatttattggtggagccttagcgtctattttctcctatcgcgttaccttctttattacaggtggtctattattaattgcatttcttttgtcattgttctttgtccatgaaacagacttcaagccagtaactgaaaagaaacttgataaagcaagcggagtaattaaagaattacgctcaccgcaattaatctttggcttgcttttaactactctaattattcaagctgcaaataattcgattaacccgatcgtttcactctatgttaaacaattgatggctaaccacggtaatgtcgtctttatttccggggtaatagctgctttgccaggaattgctacattccttgcggcatcgcgcttcggtgcactcggtgaccgaattggaactcataaaattattattgctggctttattggagccacaatcctcttctttttgactgcttttgtacaaaatactgttgaacttggtattttacgctttttagtcggctttactgatgcttgcttgttccctcaagtgcagactttgcttactaaaaatacgccagcaaaaatcacgggccgaattttctcttggaaccagtctgctatgtacatcggtaatattttcgggcctctgctgggttcaactatctcaggattaactaattacagcactgtctttatcgttactgctgggattgttgtcttcaatttgattttgtttagatttaatgtgattaaaaatttgcagtaaaaagtgtctgggaaaaaactaagtctcagatcatgaaaaaagaacgttgaatttttgtttcaacgctctttttgtatacttttagctccagccttgatattattaaatcatcacaaaataaaaaaggtggaaactaacatgtacaagaattatatcacaggtcaaactgctttaacacttaatctagattttgccattccggccaatcatttggctaatgtcatcagctggtttgtagattcaattccagaagatgttttagtaggcaagactgctaaaacgggccgcccagcctatcatccagccatgatgctcaaaatactgctttttgcttactccagaagagttttttctggcagaaagattgagttgatgctggaagaaaatctgccaatgatgatcttggctgaccagcaaaagatttcatatcatactatcaataattttagatcaagcagccatgccaatgaactgattaaaaagagctttatctacttcactaacctgttagaagatgaaggcttaatcaatgaaggtgctgcttttatcgatggtactaagattgaagctgatgctaaccgctatacatttgtctggcgcaaagcggttgaaaagtatcatgaaaagctgaaaggccaggcagttgaactttatgatgaattgattactaaagaagtagtcaaagaaatggaaaaagaaaaagttcaaactagtcaggggctaaaggaattagctcaagaaactgaagcagaaattaacaagctgactaaagagattgagcaggaaaacaaagccattcctggcggttcacctcgaaaagccaagcgacgtggactaaaaaagattctgcaccggctaagaaaagattatgtgccaagaatgcaaaaatatgaagaagccgaagagatctttgccggacgcaacagttattccaaaacagatcatgacgccacctttatgcatatgaaggaagaccacatgaaaaatggtcaattaaagcctggctacaatattcaagcagtcacgaccgatcaatatgtagttgattatgccatctttcctaatccgacagatttcaaaactttggagccggttttggatcaaatgaccgtgttggacaagtttgacaaaatcgtcgccgatgctggctatggcagtgaatacaattattcgatgctggaggaaaaatatccagacaagaagtactttattccctacactatgtatgaaaaagaacagaccaaaaagtataagaatgatccaactaagctaatcaactggtactacaatgaaaaagatgattattacattgatcatcatggcgtcagattcaatttcaaatattacagccagcgcaaggatcgttctactggtcaggtccgtgattttaaggtttatgaggcagacgagttccagctaacgccagaattggaacaattggctaaaacagctagcggccgccagcgccaagttcgctataatcctaactggcaatatttaaaagaaaaagcaaaagaagttctccaaagcgaagaaggcagacacatctatggcatgagaaaatatgatgtagagccagttttcggacatttgaagaacgtatttggcatgcgcagaacgcacctgcgaggtaaagagaaggtcgaaaccgatatcggaattgcctttatgatgatgaatttgaacaaatattgtcaaagaaggtggctgaagggccgatttttattgttaaaaattttaaagagaacaaaaaaacgatcaagattcttaaaaaaggaaatcttgatcgtttttattcatctggaagctagttttttcccagacacttttctattccgcagctttctttgcttcatgatgattataaataaagtttgcaacatacccacaaataattagcaacaacgatacaatcataatttctctaattccggtatgaaaaattgtccgcattgttggcattaacgccttaggcaaactcttcgcagattctgcgtcactcaacttattcatcatggtcatcgtaatattgtggtgtccagcaattccacgtgctagagctaaattcataatcaccccataaacggcagccataatagtttgcgctaaaattctaatcaaaaaactaagcgatgtagcaggtgccatatccttttcaccagcgtcaatctgcacttttatttgaagaataacgaagattgagcctacacctaaaccagataacgctgcaatcgacatcaaaatctgatatggcgtactaattggtacaataattaaaccgattactgttattgcaatcaatgtaaaatcgaaaattaacaaatgataattattaaaatgtctgagtaaatgcggcgtactttgtgaaccagcaatatcaaagattgagttaggaatcaacgtcatcccaccgattaaggccgttgtccctaagattgcctgcgaccacatcggcaaataagtgttaactgcaatatatgcaccccaggcaaaggcaaaaagaatgaagtcaccaactaaagctttattagtaaaaaccgataatggcacgataggactagcagcttttttctcaactaagatgaaccagacaagcattacgatcccgataatcacgaaaatagccactagaaaattactagctagtcctaacatctgaattccaatcaaaaagcaagtcaaaccgccaattagggtaaaagcacctagtcggtcaaagacagtattgatgtttggcttacgaatgccacgataaaaaagaaaactcaagataattgataccaatcctaatggaacattgatataaaagacccagtgccaggacaaagcatcaacaatccagccaccaactagtggaccagcaatacaagcggccgaaaaactagctgcaatataactcaagatgacagttctacgtttaatattcggataaatataaccaacaatcacataaggaagagaacccattccaccagcaccgacacccatcagtactcgagaaacaaggaaaaagtaaatatcgggagccactccttctaaaactgaacctaaaataaataaggctagtgacagttcgaaggcaaatttgttacccattctttcaccaattttactccaaattggcactgagaccgacattcccagtaaaaaacaggcaacaatccaccccatatactgaattccgtgtagatcggacacaattgctggaatcgccgtattaataattgtcgcatctagccctgacataatattagccagcaacaaagacaaagtaaccattgatatttgcttcttagtcatttaatcccacctttttaactctaaaaactactattactcatagtatgcaagatttaactagcaaaataaagcacaatatttttccactaaatcttgacaatctgtgtttttccgagttaaatataaagaaaataatagtgatgacctttaaagttagtcccgtgaggctaagaaggaaatctgcacaagctaatactttttgtcgttagctaatacagaaggaccatcttgagccatgcgctcttggtggtctttttcttttggtcatccagaaaggaaaagctatggcaaaagaaataatcgatgctttaagcatgaaacgcgccttgatgcgaatgacctacgaaattgtcgaacgcaataaaggtactaaagatcttgtattagtcggaattaaaactcgcggttggtacttggctgagcgaatcgccaaaaatttgaaaaacttggaagatgttgaagtccctgtaggggcaattgatatttcacaatatcgcgatgatttaccagaggctgagaaggaaaagatgatccacagccaacaacttgacttcgatatcaccgataaaaacgttatcttagttgacgacgttcttttcacaggtcggacaattagagctgcccttgatgcgttaatggatcaaggccggcctgcaaaaattaatttggctgttctagtagatcgtggtcaccgcgaattaccagttcgtcctgattttatcggtaaaaatattcctaccgcaatgaatgaaaaagtccaagtctcaatgaccgaagtcgatgagaaagacagtattgaaatcgttaaataggagttttaaatgaataaaaaagaaaagtacagaaaccctgaggctatcttagacgtttatgaaaagcctgaatttggccaaggcgtactgctatccttacagcatatgtttgctatgtttggttctaccgttttagtgccaattttaattggaattaacccaagcatcgctctactttcatcaggaatcggtaccttggtccacatgctcttgacccacttcaaaatcccagcatacctcggatcaagttttgccttcgttgctacaatgcaagccttaatgaaggctgatggctacccggcagttgcccagggtgcgatcgcttctggtttagtttacgtagttgttgcgatcatcattagcaaaattggttcaggctgggttaacaaagttttaccaccaatcgtagttggaccaatcatcatcgttattggtttgtcattagcaactactgccgctaatgacgctatgatgaataattctaagtatgatttgacttacttcggtgtagctatcttcactttggtcatgaccttagttttccaaatgtgcttcaaaggcttcaccagtttggtttcaattatgctaggaattatctgtggctatatcttatcctgctgcctcggaattgttgatttctctggcgtggaaaaagcagcttggttcacattgccagcacttgatgtgcctggaatcagttaccacttcaaatggtatcctgccgctattttagccatggcaccaattgctttcgttacaatgacggagcacatgggccacattatggtattgaattcattaactaagcgtgacttcttcaagaatcctggcttacacagaacgatgatgggtgacggtctttcaacgattatcgccggtttcattggtggtcctcctaccacttcatacggtgaaaacatcggtgtgttagctatgactaaagtttactcagtttgggtattagctggtgccgctgtttcggccattatcttcagttttgtcggtaagcttgccgcattgatcgaatcaattccaatgccagttatcggtgggatctccttcttactctttggtacgatcgcatctaacggtttgaagatcttagttgatgatcaaattgactttggtgaaaagcgtaatatgttaattgcttcagtcattttggttatcggtatcggtggtgcttacctacaactgggcaatttccaacttacctcagttgccctttccaccattatcggaatgcttttaaactggattttgcctaagaaagcagctagtgaaaaggctcaagaagaaaagattaagaaagaaaaacaagaaggtaaaatttaccaatagatagaataagccatttaaaacccgttagttatcgcaatgatagctaacgggtttattttttactctcactttgcgcacacaatgttgtaagttgtgcgaaagttggcaaaagttagtgtaagttaattgtaaaagcttaagaagctaacaaagccctatatatcaaggcttcgagctactttagtaaaaactttgctctcactttgcgcacgcaatgttgtaagttacgcgaaagttggcgaaagttagtgtaagttgcgagagcaatagtatataatttattgacacaaataaatttaagtcatgaggtgacattaaatggactttttaaacttcaaagcaattacacaaactggtaattttaaaacaccatctgaaaatgaaaacatcgaatacaaagaagctagttggaaattacctaaatcattttgggaaactgttagctcttttgctaatacttcaggtggaataatgagactgtaaaatagtttgtgtaaggatgaatgattccttaaatttatttctttaaacattagaaaaaggagttcctttctcgtatgattggtttgaacaaaaaaacacatacagaaagaagaactccttcatgaatgattttaccaaagattttgctcaagctctattcaatccagacaaaataaatgatttattgcgcaaagagctacaacaggctgttaataacttgttagaagctgaattgactgcctttctgggctatgatccctatgccagaaatggctggaatactggcaactctagaaatggtgcttatttccgcaaagttcatacgcaatttggcccaattgaagtgcaagtgcctcgggatcgcaacggtcaatttcatcagcacacgctgcctgactacaagcagcactcggatatcttggaaagcatgattatcaagctttactccaagggcgtgaccaccagggaaatagccgatctaattgaaaagatgtatggcagccattacagtccagctcaggtatcaaatatttccaagcagatgattccaaaggttgaggcttaccacaaacgcaagctaagcgacaagtttttctgcgtctatttggatgcgacataccttcctttgcgccgagaaacatttgagcgcgaagcagtctatattgccattggcatcaagcctaatgggcacaaggaggtcattgactactgcattgcgcctagcgagaacattgaagtctggacagatatgcttcaaaacatgaaatcccgaggcttaaagcaagttgagctttttctttctgatggtgttgttggcatgaaaacagccttggccaggacttatcctaaagctcattttcaacgctgtttggttcatgtcatgcgcaatatctgcgctaaagtacgcgtcgacgatcgtgaaaagatcatgaacgaattcaaacaggtgcatcaacagacaaacaaagaagaagccacagctgtcctgcatgacttctataccaaatggggcaaggtttacagccatgttatcagaagcttgaaagacatagaaccagatctgctggtcttttataactatcccaagcagatcagagcttcaatttattcgactaacatgattgaatcatttaacaatgtgatcaagcgcaaagctaagcctaaggcagagtttccaactgaacagtcgcttgatgcttttattggtattcaggcaatgagctacaatgaccgttatttcaatcgaattcataaaggctttggtcaggttcaggacaccttagaatcctactttgattaaataaataattaaaaaatcaatttacgagaaagaactatttacacaaaagatttgacagtttcggaataatagtattaggcatagcagaagataagaataaacatgaatttagtataactggtgtagacaatgttgaagacattgaaacacaaattttcaatgataataacaatatttcatgccttaatcgacctgtaatccaaaataatgatgttcagatttctttttttcaaaataaaactattattcaagtaataattcatccagaaccctttaatactcgtccaataactgcattcggtaaagcatatattagaactggtgacagagatcgagtagctactaaagagcaacttaaatattttacagttgaaagtcaaagcgagattgatactcacttactaccttcgacctatacaatagaagatctagatgcagaaagtatcaaagaatatcgcaaaataattgaagaaaaaggtattattaatactaattctcaacttagtgatcaagaattcttatattcaattggtgttttcagaaaagatcgattaagtaattcaaatgaatatcatcttacagatggtggtctccttttctttggaaaatatatttcgataacagatcgtttcccacgttttcaattagactatcaacaatataatagcgataattctaccaactggaatgatagagtttctgcaggtgacatgaattatcccactttaaatatcttttctttttataatttagttttagctaaaatagaaacaaatatacgcatggtgctagttaaatcgttttagttaataaaaaagtccaatcttgttagactcgacttgtaaatagtaataatagaaaagagtctgatctgattgaactgtcttaagcttaagcgttttagccaccatttacaagttagttttaaagatttagtgataatttgtcggcactggtatcgtttgtatgcaccggctgagtttactcatcggcgaaatattgatcaaattaaaactacggacagtctgattttggctttacttatctggcaagctaagacaggaattgaatcacaaagaagattctgtgaatgtttcaattgtttatcacactcacgttttaatcggcgttcacgtcagctattgcaattgatttatcagatacggcaagaaatgaataaaaaggttgacctgaatggacatttcttgatcattgacagctttccggtacctgtttgccaaccaattcgcaactatcgtgctaaaatttttcgcggttatgccaacattggttataaggccaccaagaaaatttacttctatggtttcaaagttcatgccattgttagcgatgacggttacattcttgattatgtcgtaacaaaagcatcagttcatgatgccaaggagacagttgaactgctggaaaatgcccatccatctaattactatcttcttggcgacgaaggctatttaggcaaagaactgcatcaacagctaaaacaaatgggttatgaactttggacaccatatcgtaaaaatatgacaggagctaaaaagcacaatgatcatcaattgatggctattcgcagaacaattgaaagcgacttttcgcttctgacctattacaatgccgagaacaatcgagcacgtagtctgataggctttcaaagccggttggaaattgcaattttagcttataatttggcttattgtctagaaagatttaactagcaccacgcgtacaaatatacctgatccatttattcaaggtaatgaccttagtagaacgtcctatcacaacgatctaatcatcgcagctaaggaagccctagtcaattgtttaatgcattcatattatgatggtatggtaggtgtaaaaattgtagatagacctagttactttgaatttacaaaccctggtactatgcgcgtaagtaaagaatcgtttttacgtggacaatattcctccattagaaatactgaaatcgctagtttattcagacgaattggtgtctctgaaactgcagctagcggtggtccaagaattcttaatactgtgttgcaaaataatttaaatgatcctgaaattaacattgattatgaaatcaatactactcgcattcgtatttttaagacttttgcaattgataatcaggaaaaattaactgaaccagagaaatttattatgtcttttgctagcagaaatcctaatttttcaataaatgatattgttaaagatccgcagaatcattttggtaaacaaaccacgattagaaaatatgtaacttaaacttcccacacgcaaaattgcttgtttcattgtgattctgcgtgttttgacaaatataaaaggcacaagtccttttcattgctataattatattgaccaaaacataatttatttgcatgaaaggcttgtgccaatgtctattttaccatctcctgaccaacaaaatgaacaactattttcaaactcaatcatcagcttcatcaagaagtttcaggtgatcaagctgttgagaaaatgtggcttccgcaaggaaaaaggcattagcctgttcagcttgtttctttacgttttaagcaatgtctttcgtgaccgcagcttatatatgcagctgaaaatggatcattttcaagaaaatttttccaagaactcatattaccgttttatgcgcaacgttcacgtcaattggctccacttcaccacacttctgtctgcgcaaatcattaataaccacttgcgatctttgacttcagaaaaacgggctgattgctttgttgtcgatgattcctacttctctaggaccggcttcaagaaaacagaattagtcgccaaagtttttgaccatgtatcaatgacttacaagaaaggttttcgcatgatgaccctgggctggactgatggagcttctttcatgccaatcaattcagtgctgctgtcttctcagaagctacagaatatgattggcgaaaataaagtttttgatcagcgcaccattgctggccaaagacgtatgcttgcccggactaaaggcacagacgtgatggttaatttaatcgaccaagctatgaaagcaggtcatcaagccaagtacgtgctgtttgacagctggttctcaaatccacatcaaatcgtccagctcaagcaaaggaagctggatgtgattgccatggttaaggttagctccaaaatcaaatatgaatttgagggagaacgcaaaaacatcaaacagatttatcgcagctgtaaaaagcgatgcggccgttctcgctacctgctgtcaatcccagtcaaagtcggacgccaggacaaagacggtgctaaaatagatgcacggattgtctgcgttagaaaccgtgccaatcgcaaggattggctggcaatcatttgtaccgacatgtcgcttagcgaagatgaaattatccgcaactacggcaagcgttgggatattgaggtttttttcaaaacttgcaaaagttatctaaaactaagtacggaatatcatggcctgtcttacgatgctttgaccgctcatgttgccatagtttttactcgctacatgcttatgtcagttgccaagcgggacgatgaagatgaacgcacgctaggcgagctgttctattgcatgattgatgagctggcggacattacttttagccattccttgcaattgattactgatgcaatgctggccagcgtaaagcaagtctttcatgccagtgaagcacaaatagctgaattcacggctgactttatcaatcgtttacccaaatacatgcaaaaattgttaaagaaaactagcaaaaataatatagaagcctaaagccaagcaagatcaagagattactggcttatttagtgtgggaagtttaagtatgtaaattcattagtagagaagcatttactatccaatgagaaaattggcaaaaaatatatctacaatttacagaaaaacaatgattatctaaatcgcgttaagcaccttaaacatcttgaagataatttactcaaatagatcattcaaaaagctcaacctacaaaattcatgcagattgagctttttcatcttatttatcttcaaatattctaggcttatcgtcatcaagtgaaacatgcggaatttcggtgttatttgtctcaacttgatccttctcagacaattctgccttcattaactcacttttggctttactagaagtattgcctaaaagtaaagttttctcctgcggcgtattcaccattgcctgtttttctttgaattttttataaacaatcgccgctactgcaccaatagctccagcaacaccgataattgtgccgattaatctcatctttttcatagggatcacctcgtattttgaaatcactttcttattcttaattatatctaattatgaggttgaacacatttttaatgcctattacctaaaactttccgcaatttccggatccatctcatcttctaaaacactgtagccttgatccaaagtcttgatcaatgccatatcctcatcatctagttcaaagtcaaacacatcaaagttttctgctaatctagccttatgaactgacttaggaattactacataatttctttgcaaaaaccatctcagcatcacttgagcagtagtcttatgatgcttttctgcaatcttttgcaagacaggattagtgaaaatgtggttggctccttctgcaaatggtgcccaggcttcaggttgcacgccctctttttccatatattgctgtgatttccattcttgattccagacattagtctcaatctggttcacagccggctttacatcattaaaagtaatcaaatcagctaagcgttcattccaaaaactacttacaccaattgcccgaatgcgtccctctttatataaacgttctaatgctcgccaagtgccatagtaatcgttatatggcttatgaatcagatacaagtcgatataatctaactgcaactttttcattgaatcatcaaaagcttgcaaggtatgatcatagccatacttatcgacccagatcttggaagtgacgaaaatatcctcccgtggaatgctgctatgcacaagtgcatccccaactgcctgttcattgccataaatttgcgcagtatccacaagtcgataacctacttccaagccgttttctacaacttgttgagtttgagctaaatcatcaatttgataaacgccaaagcccaagcgtggcattttgacaccattatttaaaattacatagtctttcatatttcttctcgttttctagttaattattgctatttaattttattttaacatagcccatgaaattcgactttatttcgtgaaacatagatattatttcttaaaattaagcactcaagaaaagcctaaccagcatccctcaacggaattgccagttaggcttcttttatttttcaacttttgcttgataaaatccaaagctcatctgcttcaacattctagtaaaactatcaatgtctagctttttaccggtagtcaaagcttcaaattcaccatcaggatcaaccaatttgcggtcagtcctgtgaaatccatttctttcatagaatttcaggcgactaacacgctgcttataatttttcgccttcttggtaactggctcaatatcaatgacaatttgcttatcagggaatcgatcctctaacatcatcaagatcttggaaccataaccttgtcctcgcaatttttcattaatggctaaataggtcaaatagactgtattatcattctcagcataataagtaatgccgcaaaactgaccatcattataaattgcgtgaaacttaacatttcggtgtaatgacattgctaaaagagaaaacatggagaatctttcccaagctggaaaagccttcatatataacttcttagcgtcacgatatgcttttgtgccccatcgggcgggtttagagtctaaaatagtatccttcttttctaattaaaaattgattgttaataactctgaataatattattatacaaaactttttagctttttggaaactgtcaaatcttttgtgtaaatagttctttctcgcaaattgattttttaattatttattcaaaataagattctaaggtatcctgaacctgaccaaagcctttatgaattcggttgaaatagcggtcattgtagctcattgcctggatgccaataaatgcatcaagcgactgttcagttggaaattctgccttaggcttagctttacgcttgatgacgttgttaaaggattcaatcatattggttgaataaattgaagctctgatttgtttgggataattgtagaagaccagcagatcgggctcaatttccttcaaacctttgatgacattgctataagctttattccatctggcatagaatttgtgcaagacagctgcagcttcttttttgcttgtctgttgatgtatctgcttgaattcgttcatgatcttttcgcggtcatccacccggactttagcacagatattgcgcatgacatgaaccaggcagcgttgaaaatgagctttaggataagtcctggccaaggctgttttcatgccaacaacaccatcagaaagaaagagttcaacttgcttcaagcctctggacttcatgttttgaagcatctctgtccagacttcaatgttctcactaggagcaatgcagtagtcaatgacttccttatgtccattaggtttaatgccaatggcaatatatactgcttcacgctcaaacgtttctcggcgcaaaggaaggtatgtcgcatccaaatagacacagaaaaacttgtcgcttagcttgcgcttgtgataagcctcaaccttggggagcatctgcttggaaatatttgatacttgagctggactataatgactgccatacattttctcaatcaagtcagcgatttctctggtagttacgcctttggagtagagcttgataatcgtgctttccaaaacatcagagtgctgcttgtagtcaggcagcgtgtgctgatgaaactgaccgttgcggtctcgaggcacttgcacttcaattggtccaaactgggtatcaaccttgcggaaataagcaccatttctagaattgccagtattccagccatttctggcatagggatcatagcctagaaaggcagtcaactcagcttctagcaagttattaacagcctgttgtagctctttgcgcaataaatcatttattttgtctggattgaatagagcttgagcaaaatctttggtaaaatcattcatgaaggagttcttctttctgtatgtgtttttttgttcaaaccaatcatacaagaaaggaactcctttttctaatgtttaaagaaataaatttaaggaatcattcatccttacacaaactattttacagtctcgctttttgacataatacttatcttccattcaaaatttaagtatgcattaatattatttattttagtaaccagtcaatgacattaacttggctaattccattatcatcataacttcccggatcttcggtaagtaatatcttagggtagttatccttaatctctaaaaaaggtgctatttctctttgataagttttttcattctgaaccgttaaactaacttgatagtattcccgaataccatcgcgaatagcaacaaagtctacttccttttttcctaaatttcccacatacacttcatagccacgtctgattaattcaagatagattatgccctctaatctgttccccatattaggacgcttttgccccaacaacgctcttcttaatgaaggatctaccatataatacttattgttaatttgtaaatactttttaccagcaatatcataacgatcacagcgataaaataaatatgaatctaccaatttttctatatacgccatcactgttgcgcttgtcgctttaacgccattattcgatagcacattcgctaccttagttggagtaattaaattgccattagtatcggtcaaaaaagctgcaatatgttccaacaaggtagtatttcctcgttgcattctagctaagatatccttaaccaagacagtgttaataattccttgaatataagacagataggtattttcatcctctaattcagtagcaaaagggaatcctcctcgctctaaataacgattaaaagcttcttgatgggataactcaggaactgaggctaaaaattctttaaaagaaaagggatatacagggatttcaatatacctaccagccaataaggttgctaattcacctgaaagcataaaagcattcgatccagtgacataaagatcaacattttgcttgataaaaaggctatcaatagctttttcgaaatgagggatgtcttgaatttcatctaagaaaatataattcattttatctggaatcaatcgttgatcaatatattgatacaattttaaataatcagtaattgtagcaagccctaaatcttcaaaatttaaaacttgaatttgttcctgcttaacacctgctttaagtaattgttcctgatatagttttaaaatcgtggacttaccagaccgacgtactcctgttaaaactttaattatttgtttatcacgtagtttattcaatttatcaatgtatttaggccgcggaagcatttttaatcctttcaagttaatgtaattcaaattagtttaattttcacgtcaattttagcatataattcaaattagtttcaatctcttaaaacttctgagatgagttttaatttaatttgaatttactcaaaggcttaccactaaatttaaataaaaagaaagtctgtcaatctaacaaactttcttttttcataaataatcgttaactacatcaacttatatttcttcatcaattcttcgatataagtgcccttaaccttcttaagcatccctttaatcgcaaacttttcaggcattggcaaatcaagatcagccaacttcttctggtcattcaggtaatacatcgcattcatcaacattctgacatcaaatgcggaagcgaagacttctggtacaccgcggtcaatattaagcaaagtgtagacagcttccattgccgtccgaactgaatactctgtcgtaaagacagtgtctcttggagtttcggcaaagttaccaataaaggctaagttcttagaatgatctggaacaacctttgggcggtcgcctaaagctcttggcataaagtaagaagtaatatatggcatgtgaaccggaattgttgtagctgcggcagctatttcaggaattctttcttccggcacacccatgtgatagagccactcttcacacatttcaagcccattacaatcaggcatcgtcttttccacataattacccttggtatcagagaataaaccatataaccaaacaattaattcatttggtttttgcgccttaaagtgtggctgacggctgattgagtaacctaatagccaattagaatccttaatagtagttggtccactagttacgattgagccactgtgtggatcctttttattaacagcttcaataaatggcacaacatcatcattcttaaaggtaatagttgaagacatccgccagttagcctttggaatatccttgcaaaagacatcaggatggccaaagtcttcatcttgagctgctaagttcttccacaatcgccagcttgcacccaattcatgttctgctggagcgtgatgcagttgatctccataggtagtactctcagtaattgaaccattagtaacgaagactaagtcatttggtgttaagtcaatggtcttcttttcgccatcttcggttaaaataatttgtttagcaaccttttcgccgtcagagcggttaacaaagatattatcaaccaccgtattatagtggaagattacaccacgatcctttaaatacttgaccagcggcaaaatcaatgattcatattggttatacttggtaaaacgcaatgatgaaagattcttcaaggttgctacatgctgtacaaagcgcatcaagtagcggcgcatctccatcgcacttgcccatggttcaaaagcaaacattgttgaccaatataaccagaagttagattcaaagaattccttagtgaagacttcattaatcttcttattttgcaagtctttttcgggagttaaacaaagatcaacaatttccttcactgcctttggtgtcaaaagaagttgcccatcagtcggcaaagcttgaccacgatttacaattactctagttttagcataacttggatcttttctatttaaacgatagaaggaatccaaaatagattcaccttcatggtcaggcgaagggattgatctaaataaatcccacaaacattcaaagtgcggctccatttcacgaccgccacgaatgatgtaactttccttttctttattatagatcccatccattgagccaccaggcagacctaattcttcaaaaatgtgaattttcttgcccttcatttggccatcacgaattaaaaagacagcagtagctaatgcagccaagccactaccaacaatataagcagatttttgatcaacatctttaggtttatcagccttaacaaaggcttcataattgccattactataatgcataattgacacttctttcaataatcgttacacttgtaactatttatgcttataaaataatgtaagcggtatcagttgtcaaacattttacatttggggatgatcttgatgaatatgaagagtctgcatacgcagcaacaaattgaacatgcattattcaaattactacaaaaaaagccttatacggagatctctattgcagaaatcacccgtaaggctaaggtatctcgtacttccttttatcgcaattatgaccaaaaagatgaagtcattgcgcaatttttatttaatcaataccataattttatcgctgatattgatcaacataatttgagaacttttaagcagcagcttactgcctaccttgaattcttcaaagataatcctcaactaatgaaattactgcttgatgcaggatttgaaggagaattacttaattttcaaactaaatatttgaaaaagctgatgtcagtttaccattctgatgtccacctacccgactatgcaatagcctatcaatctggtggaatctatatgctgttagtctggtgggttaagcaaaattatcagaccagcttgactgatttaatcacttatgccgaaaaacacattatgctgtaactaaaaaagaagagctcacaaatcgagcttttattttcaaaattattacaatttcttgcattttttaccaaagttaaagtagaaattcattacaaaggcgataattaacaaaatcaatgaaaccaacataatttccttaataccgccgtggaaaatagttctcattgttggcactaagttttgcggcaaactcttggcactttgcgcatcactcaatttattcatcatggtcatcgtgattcccttgtgcgtttgaactccgctggcccagttcagattcataattacgccataaacagcagccattactgtttgagctaaaattctgatcaaatatgaagttgaagtggccgttgccatattctttagtcccgcatcaagttgtacctttaattgcaaagcaacaaagataaagccaaccccaatgccagaaaatgcaccaataaaggtcaacatctgcacaggcgtatgtatgccagaaataaacaaaccagctgatgagataatcatggcaactattccaatcaaaactaatttaaaggttgtcatatgctcctgaatcgctgctacactttgagatgcgataatttcaacaatcgaatttggaattaacgtcatcccaccaattaaagctgacaagcctagtaatgcctgagcccacattggcatataggtgtttactgctaaaaaggcaccccaagtaaaggcaaataataaaaagtcgccatctaaatctttatttttaaataaagaaattggaataattggattgtctgcatgaccttcgcgaataaagaaaaagacgatgaagactaaactaattataatcaatccaattatgatccagctagcggttaaaccaactagttgcacgcccatcaagaataaaagcagtccgattactaataaagtagcaccagggatatcgaaaaccggtgtcttttttggagtaaccggtttgtagtaaattaaacaaatcaaaaatgcaattaagccaattggaatattgatatagaagacccagtgccaagagaaagcatcaattaaccaaccaccaacaagtggccctaagatcgcagccccattccagctggcagttaaatagcctaatactttggttctcgttttaatatttttaaacacataaccagcaatgatataaggtaaagaacccataccacctgcaccgattcccatgataaagcgagagcacagaaagaaaataatatttggcgctatcccttgtagagccgatcccaaaacaaagagtagcaatgaaagctcaaaggctcgtttgttagtgattttctctccgatcttggtccaaatcggaatcgaaatcgacattcctaataagaaaattgccacaatccaacccatgaattgaattccgtgcaaggccgcgacgatggctggaatagcggtattaataatagttccgtctagccccgacatcacgttgccaagcatcaaggctgccgtcaccattgtaatctgttttttattcatgcttaacttctttctatggtatgtaaaaagcgttagacaaaaatttctaacgcttttgagtaaaaaaatatggaggatacagggctcgaacctgtgacctcctgcttgtaaggcagatgctctcccagctgagctaatcctccattatggggcggaatgtgggaatcgaacccacgcatgctggatccacaaaccagtgtgttaaccccttcaccaattccgccatcaacggtccatatgggatttgaacccatgatctcctccgtgacagggaggcgagataaaccactgctccaatggaccaaactagaggaggatgtgggatttgaacccacgcgcggcagaaccgcctaacggttttcaaaaccgtccccttaagccacttgggtaatcctccatagccgaacagatactagtataccaaagtgagaagataacgcaagaccttttttaaaaaaaagcaaaaaaataaagcctttcggcttcattaactatgtaaatttttctggaacagcaaatacttatattctttgccagcaatttcaataaaacgttgggtagcaatattacgccagccaaagtgcttaaagaattcttgtgcatctttatcttcagccagacaccacaagtaaatcttgccatagcccatcttcttcagttcattttctgcggcatttagcaaggtcttacctacattgtagccttgaaaatcaggtttaacatataatgccatcaactcaccgcagccaagcattctagtgtcacgtggacgaccatagctaacggctgcttgaacctcgttattatcgtctttaaaaactaaattatgacgaccactctcattgagtcgttttacccaagcagtagccggaatattatccaaaaatacatctggtagcacgcctttatacgtctcttgccaagttgtttggaaaagcttacttgtttgttttgcttcgtcttcactaattaatggtttaataatcatatttacttcttctttgtcaaaacagtcacagcctctacatgtggcgtttgtgggaacatatcaacaggatcgattcgcttaaattcataaccttgttcttggaacaaaagcaagtcgcgaatcattgttgcaggattgcacgaaatataaacgaccttcttaggtccagtcttaactgtcgcattaataaattcaggtgtcaacccttttctcggtggatcaacaaaaaccacatcggtcttcataccctttttagcccaacgcggcattatttcttcagccttgcctaagtaatactttgcgttttcaataccatttagctcggcattgtccttggcatccttgatcgcatcccggacaacttcgattccacgcacggccttcacatgcttagctacactcaaaccaatcgttccaattcccgaatatgcatcaattactacatcatccgaacctaaatctgcttgcttaatcgctaaatcatacaagcgcggtgtttgcagcgaattaatctggaagaaactttgaggtgaaattctaaactttaaatcaccaatttgatcagtaatctggtcattaccgaaaactaggtaatcctttttacccaaaatcacattggtcttcttaggattatagttcaagactaaacctgaaaccttaggaatctggctaatctcagctgcaacacccatcatttgtgggaaatccttaacccggctgaccaaaatgaccattatctcgccattagccttactacgacgcacatcaagatagcgtataattcccgtattgtttacctcgtcataaggcgcaatcttgtacttgcgcaacacatcacgcactgcaaccaatacacgatcaatttccggatcagtggtaaagaaatttgtcaaaggcactaaatcatgtgaatgtcgtctaaaaaagccaatctcaagctgtccattatattctcgcacaggaacttgggccttgttgcgataccctgtttgctcaggactaggcaaagtttgtcctacttcaatctcatctaaatgtgccttcttaagtaagttaacaacttgattacgcttgaattcaagttgcttatcatacttgatatgagctaaagaagcgagtcccgtttgaacccattgattcaacttgatcttaactcgatcaggactttctttttttatttcttcaattttagccaaagcaaagttcttcttaacctttaaaatctttgcactaaccacttcacctggaagtgcattagtaacaaatacggtcattccctcgtaatgggccacacccattgcttcatacgaaagatcggtaatttctaaatctataatttgattctttttcatactcactcaaccttaaaaaaatagctctctattattataatacttgaccaatctttgtgcttcaaaaaataatcgactgctttttagaaccaactatcacccatatacgcatgcaaaatgtggttagccgctactttcaacctcaaataattaatattattagaaaatagcataatcatacgcttggtcttgtaattcgcaacaaagcagcaattataaccagggatactgccattagcgcgaatgatgtcaccattaaaatacactccaccaaaataagctaccgtctgatgctgggcttggtggtaatactcgtttaccattttaggatttttcagcacatcgttatatacaaacttccaataatcaattggtgacatgaataagttccctgctccaaagtccgacgacgtcgtcactgtcacttggtgccagtcaacatttttactcattggctgagggatctcgttttggttaacctcagaaaaatccttaactttctggagcttaagtggcttagcaaaatcggtctgaatataagcattataacttaaattagtttgtttgctaataatagctgctagcaattcataatcaacatcttggtaatcccaagtatgaagatgatcattctccatgtgattaagcatataagctatttgctctttctgatttttaagcggagaagatggtcgagcattgttaaccaagccactagtatgattcatcagctcacgaattgtaatatctttactacctgaaacttgaggataatagttagataaagaggtattccaacctaataacttttcttgttgcagctgataaattgcagttcctgtcataattttttgtagcgaagcaatcggaaacaattgattagcgttaactatttggcttgaatcagtggtctccttattttggacaacaatcggttgcccctttttatcattaattaacattacaccgttgatatgatgaaacttcatataatcatgcagctgttctttctgattcttaatgccattatccagcttatcccctggctgcacaatgaataaaaatattgcaaaggcacaaagtgccaaaaagatggataaagctcgttttttatgcataaagattcctcttaattactatcccaagcaatgtaataactatatttcctcaattgtaaatctagtatctaaatagattcaactattgtgtgattttatgcaatgaaaaaacatgcttcattagaaacatgttttttcaagtcattttaataaaaacatgaacagcataattaccgcaataaatttcactgctcttatttcatgcactatactaaaaatagcttttctataaatacgtcacattcaaaaagattttgcttaaatctattgacagatatttttaatcttgctatcatattgctcaacaagaaacgaaaagtagcaactttgctcagcgttcagagaactggtggtagctgcaaaccaggcaggcaaagcttgacgaaatacatcgttataatgttgttcggaaaaattcagaaccgttaccatctgatagagattcaagttcttatgcttgaaagagtgggtggtaccacggctattgtcgtcccgttgactaataagtcaacgggattttttatttggaggaatataaaaatgaagaaaaagaaagtttcctttactgaatcaattattatcttaattgcactcctcactattctgggattggcagttatcaagcttgccctttctccagaagtgccagttttattcattgtccttttacttaccttttgggctagactgcgtggcttttcctggcaagatgttcaagatggcatcaaagaaggaattagtgtagccattattccgatttttatctttattttaatcggcgctttgatcgggatctggattaaagcgggaattatcccttccatcatggtcctgggtttccacttaatcagtggtagtttcttcgttccatctgtttttattgtttgttcaattattgggatggcaatcggtagtggttttaccacaatctcaactgttgggattgcgctttttgggatcggaactagtatgaaccttaatcctgccttagttgctggggcaattatctctggagctgtttttggcgataagatgtctcctttatccgattcaaccaacctttcttcagcagttgccgaaagtgaattattcgcccacattaaaaatatgatgtggtcaaccattcctgcttttgtagtttcattaattttattctggatcttaggcaacagtggcaacatggatccaactaagattgaacgtacttcacatattttacaaactaacttcagtatcagctggtgggcaattgtcccaattatcttgatgatcttttgtgcttggcgcaaaatttccgcaatccctacgctctttttaaacattgcgattactgtaatcatgatttttattcaaagtccccacgaatctattcaatcgcttaacaatttagttatgaacggctttgtggctaaaactagtgatgcttctgttaatgccttattaacccgtggtggtatttccaacatgatggctacagtagctttgatcatttctaccttatctttgggtgggatgctcatgaagttcaacattgttcaaagtgcaatggaaccactcgttaaacatttaaccaagcctggtcgtttaattacggtcaccattttatctggtatctgtatcaacctttttgttggtgaacaatacctatcagttatcttacctggtcgtgcatttaagccggcttttgataaaattaagctttcaccattagcccttagccgcgtacttgaagacggcggtagcgtaattaactacttaattccctggggtgttgccggttcattcgccgcttcaactttaggtgtgccagttttacatttcttaccattcgtcttcttcagtcttctttcaccaatcttctctattttgagcggaatcaccggaatcggcttgaagtgggctaaagaaaagtagaaaataatcatatcagtaaaaaagttcctaagaccatcgtctttaggaacttttttacgcaatctactagctaacggttgtgtcatgttgcaaccaattattactcttttcttgacattaccattcgatcattcacagcagctctttttggtatcactttataacctcgtcaaattcacttcaccagccttcatttttgggattgtctttaccgtaattaggaaaaatgaccagcaggcaaaattacctttaaaatcatatttttccgaccagtgggataataacttctttcctacttttgcttggactttattttatctcattgctatgcctaatctgcagcaacacgggcattttcacaatattgccacattcatctggcaattcttcagtgataatgccacacctcatctttggtacagcgtcatgatgctgcaatttttgcttatcatgcctggaatcaaatcagtctgcaactgggtccagcattcttatcgacgactactaatcgcagttattagttccggaattatttactttgcctggttaattttttatgatcacttcattttaaatggtcccgaggctacccattggtatttattagatcgtatctttatcagctttttgatctttgggctctacggtggcttaagctggaattttcatcatgaaattcaaacttttctgtttacatattggtggctaattgtgggattttaccttttaacctattttgggaccagagatttatttttagccactttcaaattaacagacctaaccaacgacagttattacctaccttcaatggcaatttatgctttagcggttatcctcttgatttacctaatctgtattgcacaaaaagtctttaatatgaactactggctaaaatcaattcactttctagctttttatgcttatcgagcatttttagccaatgttttttgggatcgtatcttttggcaatattttaattttaaacagctagctttacaaaatatttatttagctgtcttactactttggatttgtacatggtgtgcttcatatttatctgtttatgtagttcaccacctttggcttaaaattaatggttctgtcggtccatcctaatttgcgcacgtcgatattcctgactgtcacgcgtaggttgagcaactatatctgtaattattatttcatgatcatttcgttcaaagacgattgcttggtctaattccgcatttacttttttattgatagtggtatcttgattaaattttaaatcatccagctcccgatcaataaatgttttttgcgaactcgtcagctgatgatatttttctgccgcttctggagtaaaggacaagatcgtctcccgtctgaattcacctattttatctggatattcacttctttgaccacggatgtcattgtcaatatatcttttttccatcaaaatcacttcctttatatcttcactatacaggaggcgattttctttagacatctttctgcctactttagttttttcataagaaaaactttactattattcatttgaccactaaatacggtaaaatagataagacaagtaaataaaaggagtgtatatttcatggataacttttcaaatactccaggacggcgtcaagtccaggatatttctgcagttaacagcttcttgactaagatgtacagtctcatgattttggctgttttagtttctgcagcaactgcattcttgactacgactgtgtttgcatctgcaattgctaacatgtcacaagccgtttactggatcatcgtatttgttccaattgttttatgtatgacaatcagctttaaggcagcaaagaacccaacattaggcatcgttcttctgttgattctttccgcagtctacggcttcgaatttgcctttatcgcaggagcatttacttccgcttcaatcgctggtgcctttttatcagcagctggcgtgttcgcagcaatggccgtcttcggttctgtaactaagcgcgacttgagcaactggggttcataccttggcgcagctttgatcgggttcttagttgcatggctcgttaacgccttcttcattagaagtggcgctgcaacctttatcttctcctgcatcggtgtgttaatcttcactggcttaactgcctacgacgcacacaatgctaagaagattttcatgacctacggcggtcaagtttcagatactggtttagccgttatgggggctttaagcatgtatctcgacttcatcaacatcttcatgttcttgctacaaatctttggcatgggcggagatcgcgattaattaatttccatacaaacatagcgttgattagcttttacactagtcaacgctatttgttttgcttaaattttatccaccaacataaaattcgatatgttgttgtaaattgttgaattcaactggacaataaccaccaatttcgccatcaaggttaactggcaaatcttgtccttcacttttaccaatcaattccgccttcaagctgcgggtcttggtataaatgatatttggatcatcaacgtgcttaccattcaaagccaatgccatcaacttcatcatgctaacagggtcagaaggcttgaccacgatcaattggaataatccatcactaagctgtgcatcaggcataacttgctcaaaaccaccaattgaattagtcattcctagtaggaacattgataattttccttcataaacgccatcatcataagtcaaacgcatctcattctcagtcaagtgtggcaacatttctgcccccttgattaagtatgcggcataacccaaagctgacttaacctcagatggtacgccatatgttaactcagttaaagaaccgctggcagcaatattaacaaaatattgaacctggtcaccaaaaacagctttaccgatatccattttacgagttttattctttaagattactttagcagcatctggaatattatcacgtggaatggctaatgcacgagcataatcattagtagtaccagcaggaataattgccattttaggcctgttttctaaaaaggcaatcccgttaactacttcattgattgtaccgtccccgccagctgctacgattaaatcaaaaccttccttagcagcacgagtagcttcattgcgagcactattttctttaggtgtagttctaaaagcactagcttcgtagcctgcttgttctaatacatctaaaatatcggccacattctttggcatctgttcgtgacctgatacaggattataaattaatcttgcttttctagtcataattactacctaacgttctaaaaattaacgactttgcaattcttggttaagtaacttgttaaccatcttagggttagccttaccacgagtttgcttcatgatttgaccaactaagaagccgattgcacgatccttaccattcttaaagtcttcaactgattgagggttatcatcaacaaccttcttaaccattggagctaaaacagaagtatctgacaattgaaccataccattatcttcaacatacttcttaggatcagtaccattttcaatggtttcagcgaagaccttcttagcaatcttagatgaaatagtaccatccttaattaacttgatcatttctgccaagtgttcaggcgttaacttaatatccttcaattcaacacggtgatcgttcaagtaaccattaacttgtgtgttcatccagttagctgccagagttggatctgcacctgccgcaacagcttcatcaaagaagtcagaactttccttagtttgaagcaaaacgttagcgtcatatggcttcaaaccatatttatttacatagtcatcgtaacgagcaaatggcccctttggtaattccttagcaatttcatcgatccattcttgtgaaatatgatctggtgcaatatctggttctgggaagtaacggtaatccgatgcaccttccttaacacgttccaaaacagtcttaccagttgcttcatcaaaacgacgagttgaaagttggatgtgaccaccagccaaaagaacttgttcttgacgcttttcttcatatgcaagtgaacgacgtacgtgatcaaatgagttcaagttcttcatttcaaccttagtaccaagttccttttgacctgcaggacggatagaaatgttggtatcaacacgcattgaaccttcttccatcttaacgtctgaagcaccagtaaattgaacaatcttacgtaatttttcaaggtatgcgtaagcttcttcggggtcttccatgtcaggttcagaaacaacttcaagcagtggaacaccttgacggttcaagtcaacgtatgagaaaccgttggttccgtgagtgttcttaccggcatcttcttcgatgtgcatttcgtggataccgattctcttcttcttaccgcgaacttcaacttcgatgtaaccatcacgagcaagtggttggaagaactgagtaatctggtaagccttggggttatcaggatagaagtagttcttacgatcaaaatgagtagttggcaaaatgtgagcgtgggttgctaaggcaaccataatacctaaacggtaaacattcttgttaaccattggcaaggtaccaggcatagcccagtcaataacattagtctccgtgttttgttcagcaccataggttactggtgaaggagagaaaatcttgctctttgtctttaattcgaagtggacttcaagtccgatagtcgatttaaaattcattcaattagtcctccattccagttggtgttttttcataaaacttgttagtgcgttcgataaagtcagcagtcttgaagacattaccttcatcaaaacgcttagccataacttgtaaaccgacaggcatcccatcaactaaaccagctggaacactagctgcaggaatacctgctaagttggcagaaatagttaaaatatcattgttgtacatcttaattgggtctgaaacttcttcgccaataccaaatgctggctcagtagtagttggtccaacaattacatcattttctgcaaagatcttgtcaaagtcatcacagatcaaggttctaaccttagcagcttgtctaaagaaacggtcatatgaaccagctgaaagggcaaatgaaccaagcataattctacgcttaacttcagcaccaaagccttcagaacgtgatttaacgtaaacatcaagtaagttcttagtgtccttagcacggtagccgtaacgaataccatcgtatctttgcaagtttgaagaagcttcacttgaagcaatgatgtagtagtcaggaacaacgtatttagtatgtggcaatgaaacctcattgatcactgcaccagcatccttcaaagcatcgatttgcttttgaataacttcacgcatttcgccgctaactgcttccatgtattccttaggaacagctacacggagacccttaacatcttgaccgataaacttggtaaagtcaggtacttcacgggttgaaacagttgagtcatgctcatctgcaccagcaattacgtttaatacttcagctgaatccttaacgcgcttagtcattacaccaatttgatcaagtgaagaaccaaatgcgataagaccccaacgtgatacacgaccgtaagttggcttaataccaaaaataccgttaaatgcggctggttgacgaattgaaccaccagtatctgaaccaagtgctgctacaacttgaccactagcaactgcagctgctgaaccaccagatgaaccaccaggaactttatctaaattccatgggttgtgagtagcaccataatatgagtgttcagttgatgaacccatggcaaattcatccatgttggttttacctacaaaggttgcaccagcttttttaagcttagaaataactgttgcatcatacattggcatgtagttgtacaaaatgtgactagcagcagttgtcttaatcccgttagtgatgatgttatccttaattgcgattggaatacctgctaacttactcttggagtagtcaaggttatctgcaggcttagcatcatctaaaacagtgatccaagcatttaacttcttatctgtatccttaatgtttgccacagtgtctttagctaacttatctgctgacaagtcaccgctggcaagctttttgtttaatgaatcaatattttcgtttaagtaattcattactcgtcctcatccttattaataattacaggaaccttaatgtagccgtttgccttttcaggaacgttagccatcaatgtttctctgtcttgtccttgccagtgttcaggtttatcttctctgaagacagtatcacgatcaacaacttgaactgtttcatcaacaccctcagtatcaacttcactaagttgatcagccatattgataattgatcccatttgatcagtaaatttatctaattcttcttcattaaacgcaagtcgcgaaagagtcgcaacgtgtttaatggtatcttttgtgatttccacgcaaatacctcctattcgccgccataaacatggacttgataatcactatcgccggtttcttttgcaactaaagcttgtacatcatctactgaaccaattttgatttcaattgggatattgccagacaagtactttttagctgacgacaaaaccaaacgggtaaaactttgaatttgttcatagccataaaattgcgttgttacggaaatgttttcttgtgaaagcttaccgtttgtataacgcaaagttgccgttaccccactaatattagggaagtagttttgaatagccgtcttgaaatcattgaagtgcgatgcatcatcactgttaattgctttttcactaccagttgtcggtaaaacttgcattttttccgacatggatttccatttagatattttactactattagcggccgctgtcccgtaagcgaagtaagttccaccaactaatgaatcttttccagtcttggagaataaaccaatcgtaatcggaatattctttaaagctttcttcttacgcaagcgagcaacaatttcattagctattttttcaccttgagctttttgttcagcacgtgaaatagtagtttgaaattctgcaccgttacgctttttctgataataatcaaccgaattcatggctaagcccaagctcataccacctaaattatacttggaaccagatccagtcaaataatcttgttcgataatttcttccaaataaattggattacgcgtatcggttccggtcttaccattatttactgggtttaaaccatcaggatttgatttggatttacgcattaaccaatcagttacagttgaggtatccaaatattgtccttcttggaagacgtattgattaggcgaaaattgattcttagaaatttgaatcagccctcgctctaattcacgcgtatcaacagaattatcattatcagtagctgttaatcctgcaatcggactaatattatagcgaccatttttcattaaaacggtatagccattcgttcccgtgttagtagtttgatagctttttttcttagtggttgaagtggttgtcgcattatttgctaaactagaatccttcaacttaccacaaccacttagagtaagcgcgattccagctaaagccattacttgcaaatattttttcacaataattgtcctttattcaatttgtgcaattgcttcttcttcagtcaaaagtggtacgcctaaagtctgcgctttagtatacttagaaccagcatctttgccataaatcacgtaatcggtcttatgcgaaactgaacccgtaactttggcacctaaagcttgtaattttttcgtaaactcacttctagtataatgctctaatttacctgttagcactacagtcttatccttaaatggattatcttcaatttctgcaggctcatctgcacctaagtaatccatattcaggccgctctcacgcagctcatcaattaccttctgtgcttctggttgagcaaaatatgttgtcattgattccgcgatcgtcatgcctattgtatcgatagaagctatttcttgcacgtctagagacataatctttgccagatttttaaacttttgagcaattaagcgtgctgctttggccccaacatggtcaattcccaatccagtaatcaataattcaactgagttttgctttgaattgtctaaggcagttaacaaattattgatcgatttttccttaaaatgatcgagttgtgctaaatcatctgcagttaagtgataaagatcagccacattatgcactaaatctttagcaatcaattgtttaacgatctttggccccaaaccggcaatgttcatagctggtcgagaagcaaagtgcgtaataccctcctcaacttgagctggacaagatggattgatgcagcgcaaagctacttcatcttctaggtgaactaatttttgcccacaggatggacaagtcgttggaatctgataagctacagaatctgccggtcttttagccatgacgacttcagagatttctggaataatatcgcctgctttatgcagtttaacggtatcaccaatcctgacgcccttttcattcaaataatctgggttgtgcaatgaagccctagctacagttgtaccagctagttgcaccggatccatgaccgcagttggagtaactactccggtacggccgacagtccaaacgatatcccgcactacagtttcttgttcttcaggtggaaatttataagcaatttcccagcgaggcaccttaacagtgttaccgagctcttgttcaattcctagatcatcaatttttaacacaatgccatcaataccatatgttaggctgtttcgtttagctgtgtattcatcgataaaggcaaaaacttcatctaatgtttttaacttacgaccggtttcattggtatgaaagcctaaatcatgcattttttgaattgcttggtgctgactagtaatttcttcaggcggattaacccaagtataaataaaggtactaagttgacgcttcttggtaactttaggatcaagttgacgcaaagaacccgctgcagcattacgtggattagcaaaaactactagaccttgctcttctctttctgcattcaacttggcaaaggcttccttgcccatgtaacattcaccgcgcacttcagttgttaacggttcaggcaaagtctgtggaatatcactaatatacttagcattagctgttacatcttcaccaacataaccgttaccccgcgttgaggcacgaaccaacttaccattttcatattcaagcgatagtgataagccatcgatctttaattccacgttatattcaactggatgaccaactaatttttgcatccgttgatcaaaatccttcagttcagctttggaaaagacgtcccccattgacagcattggaatcgggtgctctaccttggtaaaatcactatcaatctgtcccccaactctttgggtaatggagtcgggtgtcacaatctctggaaattctttttctaattcaagcaagcggttgtagctttggtcgtaaacattgtcttcaacctcaggcgcgtccttagagtaataggcctcagcccattcattaagctgttttctaagtgaagccgcttcttttttagcttcatcaagagtaatttctgccatttttccctcctgatccaaatcaatctttctttaattatatcttcttaattggcgcaaaggcagccaaaagccgtttgattcctttaccagggaaagcaatatccagctccatatcttcaccagtgccattaactttagttacaacaccatgtccccaagctttatgctcgacttggtcgcctacattccagcccttcttttcagcaccgacagcgcctgaagctttcttagcagtataaacttcagcgcgagctcgttcggctttgcgagcaaatggtgccgtctgtttctcaaagctagattggataaagctgctttgtaatttttcattttcttctttgtgcagatcctgttcatcaatttcgtccaagaatcttgaaggcggattattttgcattctgccatacatcatccgtgagtaagcattagttaaaaacagttcttgcttagcccgagtaattcccacgtaagctaggcgccgctcttcttctaattcattgtcatccatcattgcacgttgcaacgggaaaagcccatcttccatgccaattaagaaaaccactgggaattctagtcccttagctgcatgtaaagtcattaaagctacttgattgtcatcttcatcaagatcatcttgatcgctaagtagagatacttcagccaagaagtcgcttaatggattagactcatcttcttcgggctcataatgatcatcaaaacgcttagtaactgacaagaattcatccaagttttctaaacgcgtttctgattcaattgtattttcagctcgcaaggcatcggtataatcaaaatcagctaagattttttcggttaaaccggttactgtaccattttgagcataagcaattgcatcacgtaatttagtaccaaaatcgcttaatttcttggctgctctagtattaattgaactttcagccacatgtcccatcgcatccaaaatgttgtagtgattctcatccgcaaatgttaacaacttatccacagtagcggcaccaattccccgctttggagtattaataattcggttcatactcatcgtatcagctggattagcaactaacttcaagtaagccatcacatctttaatttctttgcggtcatagaatttatgtccaccaacgatttgataaggaatattgcttttaacgaaagcttcttcgactgttctagactgagcattagtccgataaagaattgcgaaatctttgtaagcccgttttttatctttaacttcttcttggatctttgaaatgatgtagtgagcttcatcatcaccgctttgggcttgatagtaggttaccttttgcccatcaccttgatcagtccacaagttcttagccttccggttctggttatttttgatgaccgagttagctgcggacaaaatgtgaccagtagaccggtaattttgttctagcttcacagtcttaacatcatatttcttgtaatcctgctcaaaattcatgatgttttccatattagcaccgcgccagccatagattgactgatcggcatccccaactacacaaatattcttgtattgtgcagccaaagcatgacagagttcatattgagcctggttagtatcctgatactcgtcaactaaaagataacggaacttgttttgataatagtgcaaaacttcgctatcttttttaaacaaaactagggtctgcataatcaaatcatcaaagtccataatttgatcacggcgcaatctacgttgatattcttcatacaccttagccgccatcttctcaaatggtgacaatgcactctgcataaaagcttcaggatccagcaagtcattcttgccattagaaatcgcggctaaaataccgcgtggatcatacatcttaggattgatattcaagtctttttcaatatgcttaaccaaagttaattgctcggccgaatcagcaattgaaaaattatgaccataaccaatcttatctgcatcccgacgcaagatccgcacacacaaagcgtggaaagtcgacatccaaatgtcgttagctgctggtcccagcaacttttgttcacgctcacgcatttcactagccgccttattggtgaaggtaatggctaaaatattccaaggtgcaacatgattttcttcaactaaataggcaattcgtctcgttaaaacagaagtcttacctgaacccgcaccagcaacgactaataaaggtccttcagtggtttctaccgcttctttttgttgcggattcagaccagctaagatagatttttcgctcattattttccccttcactaaaaattatttcattaatgcaacttgaatattataccaaaaaagcagcgactaattcgctgctttagatttacttatcatatttttcaagatcaaactgttcaatcaaattaatcagcttatcggcatagtccggatcagtcgcatagccgtcggtaaccaaggctttagcttgtgtcttataatctttggatgctagaacatgcttatactgatcgtggttccacgttgtcccattctggaataatctagcgtgagcccgaatagaagcctcatatgagtcatatatttggaaacgcgccttcacggtaacccacttattctttacatattccttagttgtcatcactgccgaagtgttcgggttggatcctttaacaccaaaaagattgttgtatttttgcgacaaatcactttgtccataattactttctaggcaggcttgagcaatcgtgatgcttggcaataagtcatacgacttgtccacttcgcgcgcaatcggaccaatttttttgataaagtcttttttctgttttaatagttttgctgcttcctgttctttttgcagctgtgcttgttgaatctgctctgattgaatcgcgtaacgcctataatatctaaagccgacaaaagcaaccatcagaataaatagaattacgaatacacgcacaacggttttgacactttttggtactcttgatttacgttttcttgccatagttttattccctttaattactaattaaagtataaccgatttttgagtaaaaaaaaagaagtcgctcactgcgactcctcaatcagtgcgggcgagaagactcgaacttccacgatctaaagcgatcacaagatccttagtcttgcgcgtctgccattccgccacgcccgcggcacatcaactataatagcctaaatacagttgagatgcaagaaaaaatataaattattttaaatttctgatcattttacgcaaaagtttgcgctaaacgcaggtgtcccctacatttaccacaacgatacttttgtgtattaatcctgcgcattcttgggtatctcaacccacagttttcacaaagatataggtaacgatattttttctttttacgtaagccaatatcaggtgcataacgactgcctccaacttttttcagcaagattttaaaattgcgatcacggtgtcggtaacccaagcccaataaatgcaaatgatagtgggttaattcatgcttaatgattcctactagataatcatgatattgtggtactaaaaaatgcgcgttgatttcaagatggtgatcatccaaatgataacgcccacctgttgtggtcattcgccgattaatttttacaaggtgcttaaaagggcgatcaaaatattttaacgaaattttttcaactaaattttgtaattcattctcattcatggataaaattttattccaaaaataaaaatcagcaagaatttaatctcgctgattttttgctacctaaatatcttggcatacatccccgcctgcttaggcgtactaatgtgtcgtttcaagaaagttactaagtcatgtttgaatgactttttaccatccatccaggttccagtgaataagtgaatcgatttggagtccttagaaggattacacagaactccatctgaatagacatgaatgccatcttttaacacttgctcctgattacctagctttaagccatacttatttaccagcatttcagtaacggaaatactatttactcccgccatctgattcttagtgtcatattcaaaatcacgatcttgataataatccaaaatatcctgcataaatgggtggcctttttctgcaccaaaaattgcagctgacagataatcatggttttcaaaaccaataaaggcagaagcattcaaaagactatctaacttatccacgactctaacatcagtatctaaatatatcccaccttgttcataaatagcccgtgctcgaacatagtctgacacgaaggcccatttttttgcagcataagcttgttcaatataacgattctcatgcatatcaaaattatcttcattccactcaataatttgataatcaggcaattttttcttccaggttgcaatacattcttcaattatcggggatttaggattgtgtcctacccaaacataatgaatttttttaggaatcatttttaacctcgcttcaaaaagttcttaattagcttcacaatatcatcattaaaatcaagcttgaacaagaacatcaatgtcagataaataattaacatgacaattgacttaaaagccatatcgaaaaaggcagatggaattatattaggcataaacattccaatagccaaggttagcaccgcaattaacaaatacttgggcacgtcatggaaaacataactaaattcatagccatcacgtacaacccagagccgcaaaattaaaactactgcttcagtaattaatattgcaatcatagccccacctgcgccatatggcctatctaagagataactcaagacaatttctaaaattgccccaataactactggcacagcataatccttgtctcgctggttagccaaagcaaattggttagcaaataccccgccagtcggaatcatgataattgttaaggtaaaccaaaacattaatggagtcatcggaacatatttattcccaaagaaaaatggtacaaactgtttggtatttgccataataattacggcgaacaaggtacccagcattacagtagcttccagtgattttttcatcactatcttttgtgccttttttccttcgctcgccatcttaggcataatgactagcgaaatactggtaattacacccagaatcatatttgaaattcgttgtgaattgtcataaaaagaaacctgagtcgaattagaaaaccaacccaaaattggtttatccagcgaagtataaatttgagtcgcaatctgtggaatcatcaaagtaccaattgcaattgccgtctgtttaaatttgtaaaaatgagcaatgggttttcctacatagcgccaaatatcaaaccaaaagacaaaggaacctagcattgtcgacactgacatgatcaataaatatttccacaagtcagcgggtgattttacccataataaaattagaaccacactaactaactttaccgccgtgtttttcaaaacaacacgaccaaagtcagctagtccttgaaagaaccatgaaatatcaacctgtgctgagatcaagtatggcaccatcaacaagatataaaaccaatattgaacgtgaaatacagtcgctacaaaaaccgtgactaaaatggtgataataccggcgattccttggaaataccataacccccagaaagcattggttagctcctgcggtgtaccataagtgcgcgtccgtgaaattgttcgcatccctacatacgacacagacagaatacaaaaaatcatcaagaattgcaccgtattgttcacactgctataaatcccataagtcttaggacctaagacacgcgataaatacggtacagtaatcagtggcaccaatacaataaaaatctgataaaccgcattatataagatgtttaaaaatgttttacgcattttaacctcgatattcctgcgtcatgtacttaaagacgttctcacaatatgaatcaccatgcacctggttagtcaaatgtagccagtaaagacggcgattagcaatctgctggttatcaagttgatccagattgcgaattagttcatcctctgaattaacacagattccgggagtaatctcagcatatggtcccattagtaatccgcgcgttttttcatattgctctaaaaagttagtcacaaacacaatcggtttgttcaagtgcaagtaatcaaagtagattgacgaaaagtctgtcatcaagaaatcagtatcaccgagcaattcgtacaaatcataattgtggtcaaacaagtaatcattgttcatgaaagcaatgttagaataactgctcttgaaattggcaaataaacgcatttcatagggatgcaattttacaatcagatattgatgccgcttctttaattctgtatttaatttttcaacatcaaaatcccgaaaggcaaaaaagtttctctctttgattttctccataatggatttatcttccaattcataacgaaaagttggcatatagatcccgatctgtgcctgatcgtcctcagttttaaataagtcagccaacaattgtttcttcgaaattaccggcttagccaataaatccaaacgcggaaagcccagcttgcggtatttttttgtctcaattgccatacaagcactcattagtgattcatatagatcagagctagaagcaacaatatccgcattcttgtgccacaatttttcgttacggcgattgtcgcgtcgcttagtattattagccataattcccatgcgcttgagtggaacgccatgccacaactggacattaatttgatgcttgcgcaccttaaatggttggtgcgttgtaattacatatcgcgctgctccgattttctgccaggttttccacttcaagtgtgacgatggccacggctcaactaatgtaacgttatattcaggatgattcaattgcagccacttgtaaaaagcatagccgttagatccagacctacctgaaccattcaggataaccacattattgttttccatcgtggtaaatctagccaaaaaactcatccaagccaaataaagacggaataaaaagcttttcattaaaatacttccttaaaatagtctaatacctaaagcatataaaaaaagcttgagcaaactcaagcttttttctttatttttgttaaactttattctttacccatttttctctggcagaatttaacaatttcaacaatcaaaaccatcaaaattccggcaattaaaatgactaaccactgtggtccatcaagttcagtcacatcaaagaacttagtcataaatggcaattctaccgctgccataattacagcagcaatgataattgcaccattgaaccacttgttagaaaaagtatgcggtctaaaaatcgactgatgtacatacttggaattaattgcatggaacagctgaatcaagcccaaagtcaagaaggccattgtcaatgcatccccatgttgcaacgatggatcacccacatgtggaccgacatgcaaaccaatttggtatgcacctaaaactaaaattccttccaaaattccttggtaaataattgaactggcaacaccaccgctaaagaagttagacttcttaccacgcggcttgcgcttcataattccaacttccactggttcaacacctaaagcaatagctggcaaagtatccgttaccaagttgatccacaagagctgcacaggagctaagatatcccaacctagcattgtcatcatgaaaactgttaatacttcacccacgttacaactcattaaatatagaatggccttttggatattactgaagaccttgcgtccttgctttactgcttcaacgatcgtggcaaagttatcatcagccaaaaccatatcgctggctcctttagaaacttcggtcccagtaattcccatgccgattccgatatcagcttgcttcaaacttggagcatcgtttaccccatcaccagtcattgcaacaatcttgtcattagcctgccaagccttgacaattctaaccttgtgctctggtgaaacacgagcgtaaacgctgtagtcaccaacatgctgtttgaaatattcatcatctagtttatcaagttcagccccagttaaaacgcggctatcctgacctttttcaataatacctaggcgttccgcaattgcttgagcagttgtttggtgatcaccagtaatcattactgttctaataccagcactctttgcttcagccacggccgctttagcttcaccacgttctggatcaatcattccgactaacccagcaaaaattaaatcttgttcaacattatcagttgttggatcggtgtacaattggtcgactttcttataagcaagccctaagacacgtaaagcttgttgcgccatctgcttgttttgcgctaaaatattttgcttctgcttatctgtgatcggctctacttgaccaccattttcaatcctagttactcgctgtaacaacatatctggtgcgcctttgaccgctacaaagtattgctcgccatctttattaacagtactcatcaatttccgttctgaatcaaaaggcacttcttgaatccgtttgtatttttcaagcaagtcagttacatcaatgttttgatcaaaagcaaattgaatcagggcggtctctgttgggtcacccaataagtctccgccattttcaatcttagtatcattagccaaagtcattgccaataaagctgggttattttcgctaatactttcactattatcatgtaactttttatcatagaagaccttttcaactgtcatccggttctgggtcaacgtaccagtcttatcagaacaaataatgtctgtagcacccaatgtctcaacagcaggcaatttacggacaatcgccttatgtttggccatcgtttgcgtacctagtgccaaaataatcgttacaattgctggcaagccttccggaattgcagctacagccaaggaaacggcaaccaagaacatgttaatcattaaagtagagttacgctctgctgaatcagccttgagcactcctacgataaagacaataacgcagattgccaaaatcatgatggttagggtctttcccagttgattcaagtttcgctttaacggtgtatcagtttcatcagcattgttcaacattgtagcgattttaccaacttcggtgtgcattcccgtactagttacgattccttcaccacgaccataggtcacattagtattggaataagccatatttacgcggtcagctaaagcaatgtcttcaccttctaaagtttctgcatgcttttcaactggaactgattcaccggttaacgctgattcctcaatcttcaagctgtgggcttgattcaagcgtaagtcagcaggaaccacatccccagcttctagtaaaactacatctccaggaaccaattctgtgcttggaatagtaacgattgtatcatcacggcgcacatgcgcatccggcgtagccatttccttcaaagcatcaatcgcagcttcggaacgtgcttcttgaaagacacctaaaattgcgttcaaaatgaccacaatcataataattgcggcatcagtccactcatgagctaataccccagacaaaatcgcggcaatgatcaaaacaataatcataaagtctttgaattgatcaataaaacgcatgaacatgctttgctttttcttggaagctaaggctttcggaccatattgctctaatctagctttggcatcactagcacttaacccatccttaacggacgtgttaagatctttttcaatgtcggggatcgactcgacataatattttttcgccattttccctctgctatataaaacatagaaacatgcagaagtttgatattttccacataccagaaaaaaatatatttttcctttcctaattttatttactgtcgtcatcattggtattccgatattccatctggggagtaatcgcattgaccaactcctgcagcttaagggattagccagccccattattttttattttgttaatgccaataaatttaatactgcattgtcatcacgatcattgctatagccacactcataacaaacatattcattgtgcttggtgccatgttttctattgccctgcaaagtgattttgtctgcaccatttttgacatagccgcaactggcacatctttgcgttgacgggtagcttctatcagccaaaattagctctttatcataccaagcacatttataggataatatctgtctaaatttgccaaacaaggacctctgtatgcctttggaagccacatgcgtcatcatcatttgcttgacattcaagtcttcaatgacgatttggtcataattatttgccagctcagtagtaaatttttgcaaaagatcattctgaatattgacagccctgcgataatcacgctgaagcttggttctcacttgcacgtaattattgcttcggccagccaattttccattaacccttcttttcttggccaatattctctgataatgcttgatccgcttgtacagtttctgcagtcttgccggcaaaatattgattctgccctcagtatagctgaagtgcccaacgttgacatcgatggcggtctttttgccagttttaacctttattccagctttttcttcgtaggaaagagcagcgtaataatggcctctttctctaaagatgctggcaattttaacctgtttcatcctcaatgcttcatatgttggaatatcaaaccatgatttaattcctctgggcttatccagtctgagcttgccattaataactttagctcggtcagtcttaaaaccttgacgtggagctttctttgacttgaaatgcggcttgccccagtcgagctgggctttgtcaaaaaagctcttccaagcgttggccaagtccttgactgccaactgcagacaacgagcagacaaggtaaactgccaatcagccttgttattgactaattcatctcgcacccgacactcattaggactaggattattatccttatttaaagtccgtgcttcatacatatcttgccaggtttctaaggctagattccagcagtatctgcggtaatcgcatagacggtcaagttctctttgcatggtcttgtttggttttagctcagctacctgtgttttaatcatttatttcacctccaatgcaaacataagtttagcaaaggatgaaacaaaaacaagcgaacaaaatattaaatttttagcagcagctaatttgtttctatgttttatcttcctgatcaaattaactgcatctttttctatttattgctatcaaatcctatcttttagtcaatcattatttcctcctcaaaaataaaaaagagacttacatgcttgtagcacataagtctcacgaattaagataaatccagaagtatcttacttcggctgttggattcatcgcaagcaattgctgttactcccttatgacaagttaattataagcaaaattttagctatctacaagttttagcgaattgcttttactttttataaaagtcatcaaagacagtaactggcaaatgacgcttgtgtttactcttattccataatttttcaatttgatcagctgttttatctgatacttccttaccttcaaggtaatcatcaatctcttggtaagttacaccgagggcaacttcatctggcaaatctggcttttcttcttcaaggtctgcggttggagccttttcatataaatgcttaggacaacctaattccttaagcaaagccttgccttgacgcttgtccaaacggaacaatggcgtcaaatcagcggcaccatcaccaaacttagtgtaaaagccactaaagttttctgcagcatggtcggtaccaacaacggcacccttattagcaccagcgatggcatattgaactaccattctttgccgcgccttaatattgcctttgttaaagtcagtaatcttttgaccagttgcttctacaaccttcaccatagcatcaactggttccttaatattaacaattaaatcctgatctggcttttgaaaagcgactgcatctgcagcatcttgggcatctgcttgaacgccataaggcaaacgaacagcgataaattgataagaatcatcgccagtttcctcacgcatttcttcaattgccatttgacacaatttaccagtcaaagtggaatcttgaccaccagaaatacctaagacgtatgacttaagaaatggattagcctttaaataatctttcaaaaaatcaattgaacgtctaatttcttttttagggtcaatttctggtaaaacatgttcataagcgataatttctttttgtaattctctcatcgaccaatgcttctttctctaattttacgccgaatgtcttgaatcaaatccatcttggattcgtataagttttgtgataaatccactggatattcctgcggattcaggctacgcttatattcatcccataaaccatcaaggttgtcagcacagaattttttaatttcatcaagactaggttgatcataaactaattttccatctttaaaaatatcatgtaaaagtggaatagcagtgtaatcagttaccaccttattaatatagttatattgtgggtggaacatgaagagcgcgtcaaatttgcgtggatcttcattataccgagatacccagtcaccttcatttttcttagcagtgtttgcgctaatccgccatacttgttttttacctggggtggaaactttgatggcatttgaagaaatcttcaatgtatcccgcatggcgcctaattcatcttccatggcaaccaacttgtaaacagcaccaagggctggttgatcataagcagtgatatacttggtcccaatgccccagacatcaattttagcgccttgcatctttaagttagtaatggtgttttcatcaaggtcatttgaagcaaaaatcttggcatctggatagccagcatcgtctaactccttacgaacttgcttagaaatgtaagccatgtccccagagtcaattcgtacgcccaagaagttaatcttgtcgcccatttcattagccaccttgatagcattaggcacaccactacggacagtatcgtaagtgtcaaccaaaaaaacacaattcttatgtgtttccgcatatgccttaaatgcgtcatattcactgccaaatgcttcaactaaagcatgagcatgagtccctgaaataggaataccaaacaatttaccagcacgaacattactagttgaatcaaagccgccaatataagcagctcgagcaccccaaatggccgcatcggtttcttgcgcacgacgagagccaaactccattagaccatcatctttaacagctaacttgattctagcagctttagttgccaataaagtttggaagttaataatatttaaaatagcagtttcaactaactgacactgggcaagtggaccttcaacttgcaaaattggctcgttagcaaaaaccagctcgccttccttcattgaacgaatagtgagctttaattttagattgcgtaaataatcaataaagtcatcatcgtaaccttcattttctttcaaatattgcaggtcactttcggtaaactttaaattctttaaatagttaatgatgtgttccaaaccagcataaacagcataaccgttgccgaatggttccctgcggtaaaaactttcaaaaacggcattgcgatcagcaatccctttcttgaaataggtatacatcatattaatttcgtataaatcagtgtgtaaagccaacgaatcgtctttggctaattctggataaaacattgcttctctttctgtcattaaaaattaacaatttcgtttttcattatacagccattacagtccattggctattctcaaaactatttttacctcaaaattagatacactttttcaattgagtccagttgatttttaatagaaaaatgctcttccgcataccgcttttctgtattagccatctggcgtaactcttcatgggttttattaacggccagattaatctctttagcaattgaatcaatgtctcccgttttagcaatgaaaccatattcgggtcctggaatcattttatgaatatcacctacatctgtggacaaaatagggattaaattgtctgttgcctctaaaagcacaagtggaaaactctctgaatatgaagttaagacggctagatcaattcgcttatataatccgctcaattggtgttgagtcataaaaccgtgaaaagttacttgtggtgccatgtccaattgccgcgtcaaggccttcaatgcttcaagctgactaccatcacccgcgatatgcagacgaatatgctgatcatctaattttttcacagcttttaagagcaattcttgtcctttaaccttttccgtacgagcaacgttaataatattaaaataggtatgttcatatttagctggaatttcactatcactgtggaaaaagatgccattatagatgacatgtaccttgtttttatccacatgtgcgcgattaattagtagcttggcaaaacgctgagttactacgaaaatacaatcagcttttctcaacgcacgtaaattaagtttagtaaaaatattgccaatgattcccctaccttcaaagtctagataaggatctgaatgtacagtaatacaccaagttgcacgaattcgcttgtgaatcaaagataaaaataagttggcacgcgcaccatgagtatgcacaatatcatagtgcccctcattgataaacttagtcagtctacctaaactgcctaagtcataacgactattagctcctagcacatgtgtagtaatcccagccgctcttgctgcttgtgctactggtccttctgccagcgttaataattcaaaatctttgccttcatttttggcttcagttagcaaattaacaatatgtgataaaccgccgccattttctaaaccagcatttacatgcaaaaccttcatcttagtaaaattattttcccttcttttttgactgtttaactcgcacaacaaactgtggcaaaactaacatccgcttaaatctgctaggattagtaatcaagcgataaaaccactctaaatgcgtcttttgaaaagcttctggtgctcttttaacgatacctgaaaagacatcaaaactgccacccacacccatcatcaaagctggtgtttcgttcttacgtaagattgataatagtttttcttgcttaggaaaacctaatgctgcaaaaaccatatcgggttgtgccttctgaatgcgccgtgccactagttccaaatcttcagtaaagtagccgtcttctgcaccaactagattaatatttgagtattccttagcaattttgctttgtactgcatgaattacttgtggcttagctccaattaagtaaactcggctaccacgatcgctagcaacatccatcagccaagtaaacaaatcatatccagtcacccgctcaggtaacggctgcttaagcattttagctgcttttacaatgccaatcccgtcagcagtaatataatcgggatcattttttagaattttcataaattcaggattctcgtttgccgccatcacaatctccggattagcggtcacaataaaggtcgacaggtgattatttagtcgattaataaattcattttggaattggttaaaagttttattatcaaaatcaacacctaaaatattaactttgctcattttcacacctcatgcgttttcttatctagtttctattctaccattccgacacgcaagtacgagaaacatgttcaagttttatattttattcaaacatgataagattgttttaataaaggagaaaaaatgaaaagagttattacctatggcacctttgacctacttcactacggtcacgtgcgactgcttaaaagagctaaagaattgggcgactatttaatagtaggtttatctaccgatgaatttaatgaattcaaaaaacacaaggaagcctacaatacctaccctgaacgtaaatacattttggaagctatccgttatgtcgaccaagtcatccccgaaaaggattgggatcaaaaaatcaccgatgtacaaaaataccatatcgacacttttgtcatgggcgatgattggaaaggaaaattcgacttccttaagccttattgtgatgtggtttacctgccaagaacgccaggaatttccactactaaaattaaagaagatcttaaataaaaaaatactccaattccattcaatttgaatgagattggagtttttgtttacttagaaaaagtgaattcaaatcgttctgcaacgtaacgtgcgcgggtgtattcgaatggttgcccatctgctagttcagttacctgtcgtctagtaattaacggttcaccttttttagctttaagaagacgcgcatcttgctcgttggcaattgatgcagaaatatgttccgtcactcgtccaatggcaaaaccaccgcgcttttctaaggttttatataagtgcgttgaaacatcttctttagaaaaattctttactaagtagtatggcaccgttacgacttcataacaaattggtgtcttatcagcgtagcgaatccgctccatccgcaaaacgttctcattatcttttagcgcaagacgctctttttcagataaagatggattgccaatctgataagaaattaacttacttgaaggaacttgaccattagccttagtaatctcagtaaaggacataattcctgacattttttcttgaaccttttgactagctacataggttccgctacccaagcgccgttctaaaattccttcatcttctaatgttttaatcgcttggcgtaaagtcattctcgaaacgccaaacttaactgccaattgacgttctgctggaatacgatcccctacttgataaacgtgattctcaatatcacgcttaatctgattgtgaatcttgatatacatcggttcttccatagtcgccacccccaaagtttagtactgctattattataatctaaattggtctagcttgcattaataacactgcttcaattttacagactattttttcttagcggtccacttcactccaagaatataaacatttggacgcttgttatattccacttcaacttgttcattatcattagcaactacactggcactaaattttgcttcatctttaacagctaagttagcctgattaggattcagcacaatattgtggcccttcatattagcttcaccgctcaaagctaaaaagtactcatagttcatatttccagtgaaggtaacacgtgtagcatcacatttcgcctgatcttgaaaatctgcatgagctaaaattacggcattgttcattgtaacttttgcttcatcaactactatcattcgattgatggttgaattttgaatgattgtccgtgtctttttatcaatataaaccccacccaaaaaagtagaattcataatattgctccagcagtcatcacttaaataaaagcaggaatcgctagcagacttaacttttgaattaagcatattcatccaagtttgcccatgcagtaatacataatctacttccgaattattaagatccaactccgcattcgttttggcaaaagtattaatactgccgtgaatctttgaattatttacaattgctgttccttcgccttcaattgccaaagcacaatatttgtccgagaaataatcaatttctgaatcattcatttccaaacggaaattggcatggtcatacatggaaactgaaccgttaacaattttggttgaataaagttccaacgtgatcttaccattaaccgcgatagctgctgtatcagttcccgtgcccttaataaagcaattacgcaaagttaaatagccatcaacgcctactggtacagataggctattatgttcggtagttgtatcaatgcataaattttctaaagttacataacgactatcttctgaaacactaatatagccataaatagtcgtgtcttctggcaaagagcctgttcccttaattgtgatatctgttagtgtgatgccctgcggcaaataataatatccggggcccagcatcaacacatcatcggcacgcaaatcctttaaaacctcgtgccaactgactgaactgctagatccccctactctaattatcctagccatccattatcctttcatctcgtaaaaaccgattactattgtactaattttctttaatttatgttgtatttttgctcatcaaaaaagctaggttcgattcctagcttcttatactatttcattttaacattccagtaataagccacattaccataaggagaaagttggaaacctttcactctcttattcaataagtatgacgtaccttgttggaatagtggtgccgcaaaggcatccttttgaattaattgtttttcagcgttaactaaggcattcaatctcttctgcggatcagtggcataagttgaacgagccaagtcaatttgcttccagaaattggcgttgtgataatctggcgctaaattaaacaaaccaccaactgtcaagaaatcaattggatcttcataacttggctaccaagttccgtaaacaaagtcgtaattgtgattagttgtgttagatagccgtgacttcaaaggaattgaccgtacccgtagagttagaccaggtaaatttttcatcaaattgctttgaataaattcacccacacgcttagcatcgtcaatatctgaagtaagcaattctaaggttagcttcttcttacccaattgcttcaaaccaagttgccattcctttttagcttccttggcattataggtaaccaagtcgccagcatccttgcggtaatcgttgccagttgcctgatcggtaataaagtttgcggcaacaattccatttgacaccttgccttgatgcaaaactgtcttgactaactgttgcttattaattgcccggctaatggcccgacgaatatgaacattgcctgtactcttacgcttcaagttgaaagaaagataaccattagttggcgtaactttggtatgatagctagaattattttgatactgcttaacaaaatcagaagtcaatgtcgtgtaatcaagttcaccacttctgaacaagttaaccccagttgaaggagtttgaaccacttgtacgttaactttattcaaatcaacaattttcttgttccagtaagttggatttttcttgtaagtccacttcaaatttgaacctgtccaaccagatacggtaaatggaccattgtaaactagattcttactgctagtcccatacttagagcctaactttttaaccaatttagaattctgaggatagaattgtgcaccctctaagatttgtggcaaatatggaattggattagctaatgtaacttgcaccttatacttgccgagtgctttgattcccaatgaatttaccggtgctttaccttgagaaattgcctcaccgtttttgataatggcataagaatcggcatctaaagatgaattttttgggtcaacggttctgcgccaagccgttacataatccagggcagtaactggatcaccgttagaccacttagcattattgcgtaaggtaaaagtatagaccttctggtctttagaacgttcaacttttgtcgcaccagctaattctggctgatttttcttattaaaacggtaaagaccttccatggaattctgcaaaacttctgaactagtcgtatctccatacttgctcgaatctaaagttgaaatttcatttgtgacagaggtattcattgtcttagtcggtgcagcattactgtcattgttagagcaagctgccagcaccaatgcggcagctgctgtcatcactcctgaaaaaatccattttttacgtctcaatcttctcaccctttacttactttttgtttaatacttacattttacaagtatatctaatacggaagaaatttcaaatactttttccgtataatagctataatcaatacgtatacaaaaatggcaaaaaaagaaacgtcacataggacgtttcttttttcgggttgggtgttcttttagaactattgggttagctggattcgaaccagcgcatgatggtaccaaaaaccattgccttaccacttggctataacccaataccagctgaactttttacttgtcgttcaacaatggaggagggtggattcgaaccgccgaactcagagagagcggttttacagaccgccgcgtttagccacttcgctactcctccgttagctgacttaattataataacgaaaatccaaatcaaatgcaagacttttttgaaacttttttcaaaaaaaagaagaagccatgacgacctcttctcaaaatttaaaaattgatttatatctaaacagttaattttaagcctaatgccttttgtgctacttgatttaccagactccattgcttgtcataagttggtgaaaagaagaaatctgcttctgctaaatcttccagtgtcaacttatttctaatagctaagctcaaaacattggcttggccactaatgtcatatgatgaaagtacgctaccgcctaagatttggtggctgtcttcattataaacaacagcaatatagcaagtaggattatctttttcaggaatatagtctggacgaagataactctttaagactgtttcttttgcattaattcctgctcgcttggcattcttttcactgagtcctgttgttactgcatgtaaatcaaaggcttcaagcaattgtgcaccaactaagcccttaaagacacgttctggcttgtcttcaaataagtgctcaacaacatattgagcctcatgccgtgcagcaatggcagatggcatcggtactcttctgttagctggaatgctaaatgggaagattgcatccccaattgcatagacatcctttacattggttctaaagtaattgtctaccttaatgtagccattgtcataaagatcgatcgtgtttttcaaccaatcagtatttggcttaataccaactgtaataatgacacaatcagcagtaatatcacccttatcagtctgaactgcattgacctttccattgccaacaaagccagtaactttagtgttcatagccaggttaacaccatgatcagtcaattctttttcaaataagctagtataagtatcattcaaataattttctagtggtttttgcccaccgtcaattaaagtaacattcttgcctgctttagcgaaaacctcggcagctgcaattccgttaccagcaccaataactgcaacatttttaatagcttcatcttgagcagctgcattgatctctgtagcgcaatcatagcctctcatcaacataatatttttcaggtctgctccaggaagaggcaaacttgcggggttaacacctgaagaaataattagcttatcataactaacttctttggttgtaccatcttttacgtttttgacagtaaccgtctttttagctggatcaagagctgttactgctgtgttattaacaactttaccaccccgttcaactagatcttcaggagtaaagtttctaacgttgtcttggcctgtagtttttccttcaaggaatagcttcattccgcaagacataaaggaaacgaagtcgcctgcttcataaatcgtaacgtctacatcatcataacgatctaaaatttcataagctgcctcttggccgccgtgggatgcacctacaataatgattttcttttttgacatagcctgacctcctaataatgcagcaataattgtcgtttttaagtaatagcagttattgtaactggttacattatttatcttttaataagatatttcaattaatttgcttttgattagtgcgaagcagcaatatattttttatataaaaaagagcactactgatagtagtactctagagggaaattttccaaaattatcttatttagctaattctgctgatagatttcgttcactaatttagtgatttcattacgattaagaacttcatcatacatatccattgtttcctggattgtattttctaaattagtaccatgatttttggcatagccaataaacttttttgcatctactattttagcttctttaatcgctttttctgcagctcttttagcaacttcattcatctcatattctggcttattcatgtcttcgacccattttccgctattcacgtagtagtcgatatccttctgcaggctgatatccctgcgtagtacatcatccgtttttctagatcatttttacgtgttgtttgcatctcaatatcatacactcgactttgatcatcttgtgcccagatatctaagcgaatgtttttggattctagtccaatgttgccgtcatactgggtaatgacattaacttttgtcaattttaattcaggaaacatccgacgtagcagttccagacaattctttttattgctcataacatgaccgaataccaagtcgttagtaattcgaggatatcgattaattcttctcctcatattttacctcttttctttttcttaagtaggaaaattaccctccactatttattactcaaaaaagtgcaaatttttcagaaatttaaaaatttagacacgaaaaaagccgatgcaaatgcatcgactctttcagttaaattattctactttttaatagaagtttacagccttgatgtaacgcttgttgtttctgcagccttcaattctgtagtacttcttaccgttcttaaatctcatttgaccaccgtaagtagttacagtttgacctctgtacatcttaccagtacctggagtacgacggtatgatgaccaataaatgtaggcattgtgcttaaaagtacgttggttaccagtaatgttggttacacgaacgtattcgtccttgttagccaccttgtagtaagtcttaccgttgatagttacaacagttggaacgatttcaatgtcgttgtaagcgtagtacatgtgacctaagtagttaccgttcttgtcataagctcttgaatcaaccattactggcaaagtcttggtgttagtgtcaccagctggcttaacaagtgatgaagtcttaacccaaatgttgcttgagttagcatctgacttagacttagttgaaacttgtgagtatgatacattgttaagggttctagtttgatcagcaacgtaaacagtgtcaccatctttgaaagtagttgaagctggtcttacattaatgccataaatgtggtaagttgcgattgagcttgcgccattagcatatagagcttgtttgtggcttgaagtaattaaaacagtgtatgttgcagtagtcttcttaccagttaaaccagtagcagttaaagttacattatagtaacgtcctgcttctgaagtattaacaggatttgaagttgcttctagtgaagcagctgtattattattgctgttttgtacagctgaaataataactggctcaccattactatttacaaaattagttggattaaattgtgaaccaacagctacttggaatatttgaccattaacactccccttgctttgaccattcaatgaccaattgatcactggattttgagtagtatctgtagttgaacttgaacctgaaactacaactgggatttgaacagtagctgtttgcgtagaagtagaacctgtaccagttaaagtaagattgaaatcactagttggtaccgcagtaatattcttgttatctttacacctgcattcttaagaatagcagcaacttcactatctttaaggttaactttttctccactggcattattcgtactaaagaaaactaatcctaaatcattaattgccttagtaacactagctacagtatctttagccttaatagaaatagtagttggtacaacattagctgttttatcggtagtacttgcagcatcaattacttgattgccatatgtaaagtatgatctatctgttggctttgctgttgttgctgtagtagtacttgtagtaccagtagtgttagttactgtacctaaactaatagcagcgttaactggaacagctgaagctgctacaggagcaactgccaacaaagcggcagcagccatacttacaattcttgtattctttctcataattatgtggcctttcctttctgaaacagaaattcatcctaagcagtaagttatatcttcttctgcttgtgaaataattatagcatgttacgaacccgattactaaaaacaggatcgactcgtgtgtgtgattttaagaatacctcctaaaatcaccagtaataccctaccctttatttgttaaactgtagttaccggacttttacaattaagattcaaaacattacatttttgtgaagttttaaacaagttattgatttatgacagaacttatgtgtgttaagaaaaggtaattttaacacttgttcgcttaaaaaaattaaagctcttagattttttgattagaaataattgcttcatgttctttaatatgctcaactcgccctgcatcccccgcaataagtaacaaatataatgcctcaatcattgtcatacttgccacgcgtgagaaataatactgcgattgcatcaccgtctgccgcactgctgtctttaaatgcacatcagctaatagcgcaatcggtgaatcatcgcgattggtgatcgcaatcaccggcatccctttttgtttggctaccttaatttgcttaatgattcccgctgcttcacctgaattcgaaatcaccaacaagcaatcctttttactcaggttcattgtctgcgcaattgccgtttcaatcgtgccacctgaatcaattgccaacaagccaatctgattaaacttatacactgcatcagcggccaccggataagtatcgccctccgcactaacctgcacaattctgctttcagtcaaaaaatgcagcacctgatctaatttggcttcagtcacattctccaaagtcgccttaatctcggcgactttatttttttcaatcaattccaaattagcactagcatcatcacgtgacatattttgaagtgacacactttcagttgcattctgagctagttgaatttttaaatcatgaaaacctgtcaaatctaaattatgacaaaaacgcgtcaccgaagcatcactcacctcagcttcagttgctaattttgaaattgtataatttaccacctgttcgggctgttttaagatcacttgagcaatcttctgatcactggctgacattgtcgctaatttactatagattgtatcgataattttagtcattattctcaccttttctgtgccaaaattatatcatcaatgtaattaattttcacaattttatttttaaagaaaataaatttatattttgattgacgaaaatcatttaccaaggtagtatgtatttgtaaataattttcacaggagaaaataaaatgaaaattaattcgataagtgacctcgctttaagtaaaatcaagccgaaaatgactatttctcttggcggcggaagcaatgtatttaagttatctcaagcgattgcacagcataacttagacatcacattatattctccatccgaacttactcgctttaggtgcaaagaactcggattagagcttcttccatctactgcagcgactaagatcgatattgcttttgatggttgtgacagcattgataagaattttaacgttctaaaaagtttgggtggaattcatctttttgaaaaacaggcagcacaaattgccaaacagtttatcctactcttacccagtcaaaggatacaaccgattctgaatcctaaaattccactttgtcttgaagtggcaccgccttgtgttaatcaagtacagaagtatttaagcagtttacatttaactagtaagattcgacaagatagttcagtagctgcatttgcccgtacgcctttgggcaactacttaatcgatgtttttaacgaagattggcacaatatcactgaacttaatcgtcaactttgtttacaaaatggcgtagttagttcttcactatttgaaaacttaactacttcattaattactgaaaaagacggagaaattattgaacttaagagaggtaataatcatgaaaacatttaattggggaattattggtactggctggattgcacatgatatggctgatgctttgaacaaagtcaacggcgaaatttatgttgccgcaaatccaaatgaagaagcactccgtgcctttgtccaagaaaaacatgtacagcatgctttcactaatcctgatgaaatgattaaggatcctagcattgatatcatctatattgctaccccacacactttccactacgactacatcaaaaaggccctcaatgctggcaagcacgtcttttgcgaaaaggcaattaccgtcaatgcacagcaatttgatgaagtggctcaattagctaaagagaaacacctaatcttaatggaaggttttactctttatcacatgccaatctaccaaaagatgcaagatatgattaagaccggaaaatttggcgaaattaaaatgatccaaattaattttggctcactcaaggactatgatccgcagaatcgcttctttaataaggagctcgctggtggtgcattgctggatatcggcggctacgcaactgcttttgccattagtttcatggatgaatatcctgaaagtatcaataccacggtaaaattctttgaaactggtgttgacgaagaaagcggcattattttaaaaaattcgaaaggccaaatggcagtgatgtcattatcgatgcgggccaagcagcctaagcgcggactggtttcgggcaccaaaggttatttcgaaatcaatcaatatcctcgcggcactgaagctgatattacttacacccagagtgctcatgaggaaagctatgataaggttactgccggggatgctgatcaggcgcttgaatatgaagtcactgattttcaaaagtatattgaacaaggccatgacgaaggcgaattggaaaaatcgcggatgatcgctcacattttaaccagcattagaactgcctggggcatgacttatccatttgataacgaggaataattagttggatttcaaaagggatcgatacataacatcggtcccttttatttgcacttattgcttattttctgcgacatatttttctagtcgtttcaagccttctttgatctgatccatcgacgttgcgtaagacaaacgaatatatcctgctccacctttagcaaaaaatgagcccgcaattacagcaacatgcctcttttcagccaaatcataaataaacttggtatcatcttgttccaagcctgctggaattttggcaaaaatgtagaaggcacctttaggcttaacgcattcaaagcctaacttggttaatccttcataaagcacatcacgccgcttttggaattctttcttcattggttccgcatcgttcattccattgcctagtgcttcttcagctgcatcctgcattggcgttggttccgtcgttgtgattgcttggtgaatcttagccagttgatccaaaatcggcttaggcgcagctaccacaccgattctatagccagtcattgcccaagcttttgacacgccattcattaaaacaacttgatcatgtaaagtcttttccatcgaagcatgtggctgatcataattgagctcactataaatttcatcacaaagaacaaaaaccggcttatctcgaacaacatctgctaaggcatcaagttcatcttgtgaatacatcacacctgttggattggtaggataattcatgacaagcgccttaacgcgatcaccatacttgtccaatgctgcttgcaatttatccggcgttaatttgaagtcatcgtcagaagtgtcgatttgttcaaccgttgcacccatggatagggcatccccaatataaagcggaaaaattggtgttggcaccaaaacaacgtcgcctggattaagcgccgcagtcaaaaagtcgtagatcgactccgttaccccattggtgatcaaaatttcgcttgggtcgtatttttgtccatatttttcagctaaaaaatcggctgccgccttgcgcaaacctggagtcccgttagatggcgcatagtgtgaatggttattagcaatgctggcttcagccgcttttttaatatgctctggcgtgttaaagtcaggctcaccaatcgtgaatttgacgatgtccgaaatcttgttggtgtaagctgcaaaggccaaaatctgccctggcttttgttcaaccaagccttttttcatatgttttgttaagtcgaccatagtttttcctccttatatcgaactaaatcaattcaaatataggagtctttttaatctttgtcaaaggaaatattaattttgatatctaaagtgcacattaaatccaataattaacaaagcataaatactataaatagccgtaacagtcggatacattgcctgatactttatcagcaaaagaataattaaaactatcgccaaaacaatcgttaatattctaaaacgttgaaaatatgacaaaatcggtaaagccactgtcaaaactatatcagttattaagatagtaaaatccaccggatatgatttgatataaaaaaactgaaatattggcaatgcttctaacagtaagaagatataactaataatcccacatattaaaagcaactgattaagtatctttttatagtctttcattaaatcaagaacttctcttttttcatgtaccagtgcttaaccagagtggtcaatgcaatgtacaaggtcaaaagtacaagaactacgagaacataatattctgggatcggaccgaatttcattaccttagccaagcttggaatgtaaggcattgcagtaccgatcaatcctgcaccgatcgtagcgagcattactacgcctgaagagtgctgttgtaagaagggaattgctggatcacgcaatgcttggataaccatttcctgtgtccagagtgattcgatgaaccagccactccagaagatggccataaagacagccttttgccctggagtagcagccacataacttgtgcccacagtacttggacaaatccagaagtaaagcaaggcaaacgtaatgatatcaaagattgaagatgtcggaccaaagaagaacatgaacttaggcaacttctttgtctcccacttacgtggtacttccaagtatttttcaccaactctatcaaatggaagtgacaaacaagatgtcccgtagatcaagtctagaatcaacaattgcattggcagcattggcaagaatggcaagaatgatgatgccactaagattgacaaaatattaccaaagttagatgacaaggtaatcttgatatatttcatcgtgtttgcaaagatctgacgcccaattcttacaccatgttccaaagtacgtaaactcttgtgcagcaagataatgtccgcactcttttttgcaatatcaacagccgtatcaactgagattgctacatcggccttcttcatggctggcgtatcgttgataccgtctcccatgtaagcaaccgtgtgaccattttccttcaaaatctgaataattctagcctttgactctggtgaaagctttacaaagaggctacattcttcaaccatctttttaacttcatcgtcgctcttaccagcaaaatctttttcactataaatgtacttggtgttcaagcctactcttgaagcaacactcttagttacagcagcgttatcaccagtcaaaatcttaacggtaatatcgtcttgctttaacttcttaagcacgtccttaacatcatccttaggtggatcaaggaaggccaagaagccagttaagatcaaatctttttcatcgctaacattgaattcaccggcttgagcaggattgttcttgtaagctaacaaaacaactctcaaaccatctttgttcaaatcttcaatgtgctttaaaactttttctttgtaatcatcagttaaatcgttgatgtgactgccaacttgcacacgattgcagcaagcaagcatttcttcggcagcacccttagttaccaggatacgaccatcgccgtggcgcttgaccacgacactcatgcgacggcgcttgaagtcgaatggaatttcatcaaccttagtgtagtcgtgtttaatttcattaacatctagctcatcgctagcggcatcgatgatggcttggtccatcaaatcgtgcatccccgtttggaagtacgagttcaagtaagccaagcgcaaaacctgtggattttccttcatatccaagttgtagtgccgttccaatacaaccttgttttgggtcaaagtaccggttttatcagtacaaagcacgtcggcggcaccgaagttttggatggagttcatctttttaacgatggtgccgtgcttcgacatttctagcgaacccttaaccaaattactagtaacaataactggcaacatttctggagttaaaccaacggcagtagcgatggcaaacaacaaggcgttgagccagttacctttagttaaaccgttgatgaccaaaactaaaggtgcaatgatcgcggtcattgttaacaataatttagaaatgttcttgataccaacatcgaaattagtttccttaacgtcgttgtttgaaatatccttagccaaacgaccaaagacagtttgttcaccggtggctaaaacaacgccaacacctgaacctgacacaatagttgttccttgatagattacatcaggatagtccaaatattgatccatgtctttttgatcgggcctcttagtcgcaatcttttccacaggcgttgattcaccgttcaaagaacttgatgaacagaacaagtctttagttttgagcaatctaatatctgctggcaccatgtccccagcgtggatattaataatatcgccgacaactacttgcttggtagaaatttcttcatccttttgattgcgacgaatattggtagttacagacaccatatttaagagggcttcaactgcgtcattagttttcacattctggataaaggatgttaatccagaaataatgatcatcgcaatcataatgatcacagtactcaggtccttttgatctgccggcacgaagacgtagtcggtaaacagcgacaccgtcgctagcagcaacaggaccattgtaaaaggagtgaagaatgattcaatgaagaaatgcaatttcgtgttgtgcttcttggtagcaacttcgttaagaccattcttctccaaacgctctttagcttccgccgaagacagaccgtctagcgaactatgtagcgtctttaacgcttcttcgggagtttgcctagcgatctgcttaacaaactctgtatcggctgtcttcttattaatcagcaacttgttttttgccatgttaatcacactttctgattaaacacgcaaacaaactaaaaaggagccaataccaattagtattaactccttatctaagcgatgtttcctcgtcgttcagttttgacactacgtgacgtaagcacaggctagctatctggatctcgccttatctcgacaagaactattttactcgttggcatctctggatgtttccgggcgatagcttgtgttcacgtaggagcctcacctaacagtttatttgctttttcaattttcatttttattatatgcatattatttgacaatgcaattatctttactaaatcgttagaaattgtaaaagaatttaagaatgataaaaaacacgtgtttgcaatgaacacgtgtttttttataatttaattttgatatactattctatagacatggatatgttgcaactatttgtgtttagtagttttagcataactaaccacccctcacacattttgaaattacggcggtgagagttatgcataaacggatagtttggaggtttagtgctccgtggtagcttgggctattgcaatcagcatcgttctaggtgctttaggcaatttagctatcaatttggctatagcctatgcgataacaaaaaaagctaatcgcaaggattagctaaaccaacagttatctgaaactacgatcgaagtcaacggattgcggccgtgggcttcttttcatatacagattataacatgaattatccgaaacgaataaaaaagatcaggctcactgcctgaccttgctattgggttagctggattcgaaccagcgcatgatggtaccaaaaaccattgccttaccacttggctataacccaatcttcaaaccttttacttgattggttctatttgaatgacctctcgatcacccaacagatattagtataggggaatgaagaaaaaatatcaaggaaaaattcaaaaaaattttgattttttcacatttgctcgaaggatactgaatctttcttttatgaattataaaattaatttgtttttttacgattataacttttgtgacttcttaaccttattcattaattcaaagtcgttggtaaaaattccagctacaccaagtttaaagtacctttttgctatgcttactttatctactgtccaaattctttgcgtaactttgctaggtaaataccaatgcggatggatcgctgcaaaatgattcttagccgcaaactgttcaggaaacggcaccggccatttgtttaaaaagcaatattgttggtggggatcaattcgctggcaattttttaaggtttgataattgaaggaagagaaaataatgggatgcacaaaatgatattcttgtgctaacgccaaaacgatggcttcaatcccctcatcatgaatcttgttagtcttaaattccaagttaacatacaaatcctgtccctgaagaatttcaaataattcacttaacatcggtaccggttcaccgttagctaaacgaaatcgcctgatttcacttaaggtatagtccttaatataacctgtcccattagtagttctatctaacgtttcatcatgcattactaccggcactttatctttagttaagtgcacatcaaattcgacaccttcagcgccatgcgttgctgcatatttaaatccttgcaaagaattttccgcaaatttgaccggtaagccccggtgagcaaaaataattgtctgagtcattttttcacctacaaaaaaatgccgctctcgcggcatctgctctattttaatctaagacgattgcaccttgagttgccaaagtatcacgaactagattcttaacatctcttctaactaccataccatcggtgttctcaacgtattcaagatattgagctgacttaatatgtgcatcataagccttgtcatcaaagtaaacttcgacaaaataccattcgttttcgttcttcttattgactccagacatcataatttccatgcctggttcagcagccatgctagtcgtcatttctttcttaacttcatgcgcaaacttttctgcatcttctggtttaacttcaactttaactaagcgcattacaaaatgatctgcgttatcattcaaagcatcatgagcctttgtggtaataacttcgggctttaattcgattacttctttgtctgtggaaatcttgtcgatggtttctgcaaaatcatcagcatgtgctgctgcaatgtgcaaatcttctgccaagctattccggaacaattcgatttcgtaattgtcttcaccatgagcatcgtcatgtgcgcttccaattaacaaagttccttcttcagctggaattgagttgtgcatgttattttcaacttcacggatatattcaccgcgatcgttttccttgatatttaatttagtaattctaaaaattggtgtttcatccatttttcttgcctcgtactataatctttccacacctatcattataaactaatgcagaaaaataaaagcccctattcaccagttatttgatcaattttaaccgctttagctggccattcagtccgtacatattccaatgtactgccttcattgctagttaactgcacaaaagaacaattgggcagacctaaaaattcacgatggttagttttttcattaatgtattgcgacaaactatcgccatgaccaacaactaaaatattatcgccatcttgtgcatcccgcatgatcaagttaatcccgcgctccattcgctcaactacctcatgattatcttccacgcgaaatttgcccaaacgatgcagcggccaaagtagcacattgcgtgcctcaaaagcgccatagcttttctcttttaattcctttaatcgaacatactccatctcaggcccagcaataatctctaaagtatcacttgccctttcttggggtgagcaatatgctctagcaaaattaattccctgatcttgaaaataatcccgcacggcttccgcctgcttaatgcctaatggtgttagcgctgaatcacagcttccctgcatgcggtgtcctttattaaaccaagtttgaccatgtctgactaaatataaattaattgccatttcgtcttactttaaaccctctgctggccacacgtatgaatcaaaatggatctttttaccatcaactgttagcttcacgattgaagcattgccaaaaccgccaaagttcttattctcggtagcatcgcgcacaaacttagctaaaatatcaccatgtcctacaactaaagcagtttgaccatcctctaagccgcttaaaatctcgactaccgcacggtgcattctagcaacaacgtcttcgtctttttccatagttgggtctacgttaggattattataattccaaggcaataagaactcatcacgaccttcaaaaatgccataacatttttctcgcaggtcttttaaacgcgtataaggcatttgatgatcagtaataatttccaaagtatcgcaagcacgctcttgggttgatgaaaaagctttgtcaaaatgaataccctgctttttaaaataatcacgggccatttcaacctggcggatgcctctttcattcaatggtgaatcacaacgtccctgaactttatggtaatagttaaaataagtttgtccatggcggactaaatataaagtttttgtcatattttcctcgctaaatcgttttttcctttatcttatcaaaaaagcacgcgtcgtgcgtgctttcatattttttcgttaaattttgaagttcttgttgtattcactcgaatttacaacaaaacttggcacactaatgaagtgcattgagtaaatattgccagtcttggaaatgctaaagccataataattgtagtccccatcatgacgtgagccctgtgtattaaataaatcaccggcatgttcccattcgcggtaaaggctcttatcattacgctgattttccccagctcctgcaaagccaaagatcatttgcttcaagccaaagtaaatatttcgcttcatttcagccatagacataatcttcttattagtagaaaaaccagccatatcttcgacataattatcgtttaattctaagccatgtttcttgcaagcccgtacaattccggcaacatagtgatcgccatctttgatactcttgccattttgctcgtattcttgcgcaattgaattagctaaggactctactccagaactataaacccacggcttcaaacctaattgactacgagcactattaattaggcacaaagagaattctgccagttctttttgctcactagcagaaagatcggcaagattgatcattttttgatcggctttgctttcacctgagctaacacgtgaaaagtcgttttgctccattcctttcatgcaagcctgaataaaactagcacttggcttccccttatatgcttgcaataaactagctttcgtatagccactcggcatcttcattgtagctgttacataattctgcgttgcagcagtctttttaacgagtttggcatttttagctaataaccattgagagttatttccaatcttataagccaaatattttttcttgcccagctttaaatactttttagcagaataagaatactctcttttagctacagcataatacttagacttcttgcccttatttgtataaagtctaactttcttagttcctttaacctgaacttttcccttaactgctgcttgaaccgtttgtggtgtcgtttcgtgtattacactagccgtccccatcaggcaaacactagtcaacaaagtcacaattaatttttgcttcatagctgttccactttctgtatgttttgattattaatatttgttatttaaattatatcgtatttatttaattaaaaaaatcaaaaagagacacactatcattttgacagcatgcctcctttaagttagtttgattttatttagttttgaaaagaggtttatttttagtaccagccgtttgcttgccagaatgccttagcagcagtccatgagccataacgacctttgacatagttatcagctactcgctcttggttagctgctgaatagtcaccattcaagtatgaagctgaaagttggtatttaccaacgtattgaccatttgaagcaccgtatgagccaccagattctctaccggcaatccattccttagcactagcttctgaaccacttacagttgaagtagtagtttgagtgttggtgttatttgctgcagtagtagttgctgcagaattagtattttcagtttgagtttggtgttgtactggagcttgggttacagcagcttgagtgtggtagccgcgagttacatacttagcacgaacccattggttcttgcctaagtcataccacttgtgacctttggcatcgtaagcagtcttaattactttccatgaggtgttgcttgccaaagtttggccagtagcctctggattcttgtagctgttgtaaacagtgattgcgttgtctgaaacgttcttaactgttacaacagctgtatcgttttctacaatagcagcttgagcagtattagtgttgttattagctgctactaaacctgtaactgataaagcagttactgcaattgacttaactaagatagatttaattttcaaaaaaattctctccttaaaattttaaaagtcataagtaacgaattttcaccttattcgtccgtcccattcaattgacacagcatatactaccttgcttaaattgcagaactataacaggaatatcacctgcagattaagaaactattgcaaagtatgtcaaaattgtaacaattgtaatatttatgtaaatttattcagatgatacaaaaccgcatcagatcgccatttaactcgatttttaatttttatttgctatgtgcaaaagcttgttcgcatttaatatattgaaacacttttgcaaaacgaaaaaagaaagagtttcctctttcttttttaattctcacaaattttttattaatttattccattattctgccttatcctcttctataagttgacgtttattaagtgccgcaataaatggcaggtaaatcaaaatgtctaagataatattgattacttgcaaaattgagcccgcaatactgcctgttgccaaaaaaactgaaataattggcggcattgtccaaggaattacagtcccattacataatagaactaagcctaggttcattgcacaataagtggtaatcgcatttaacattggcgcaatcataaatggaataattaacaacaagttcattacaactggcagaccaaacatagttggttcattaatattgaacaagccaggtacgatggtcagtggtgctaaaactttattttgtttacttgcgcgcttgcgccatactaaatatccaatgcaaagcactaacccaatagtggcacctccatcacccatgtaaacaaagttatcgataaatggttgcgtaacgatatgaccaccatgagctaaatctaagttacctgcttgattcaatacacggttagcatcggtttgcatcaaccagattggttgcatagcagtattaactacgttaccaacatgaataccaacgaactagaacaagctcaataaaataattgaaactaatgtaccaattaaggtatcgcctaatgcacctagtggcttagccaaaatattcatgattacatcgtgaatattgccccatccaatccaagcaaaaagccagtaaacacagccagcaatagcaattacagcggcacctggaattaaagctgaaaagctcttagctacagcaggtggcacagtagctggcattttaatttggatattatgattaataaaccattggaaaatccatgcacttaggagaccaaagataatagctacaaataatcctctactacctaagtaagtgtaagggaagccttcaactggaactttatctccactcataatacttggcgtcaaaatgaagaatacagctgcagaaacaattccggcagaaacaccatctgtcttatattgattagcataactccaagcaattccaaaagctgcaattaagaccatgatcccaaaggagccattagtaatcttggctaaaatctgtgccaggcttataccatgaacagcagtttttgatagccaatcagaccaaccggcaactggaaatgaattaatgatcctacaataattaacggtatagccatggcgataccgtcacgaacagcaattaaaggtttaaaactgcctattttagcggctacaggcataatgtgtttgttaacaaacgcattcaaacctccgctcgatttactattagccataataattccctcttcaatctaaaaatgatctcgtgtttctttggtatatacctttcgcaatataacaatatcctgaaagcgattttattaccactattttaaaagataattttttgcttatatttttaaccaaagtttgattaacaaaatattgcagttatggctgtaagtgctatagtttacatgtaatcataaaaaaagcgaggaaataaaattatggctaaatacgaagtaaagttaagcgaagaagatttacaaatgatcaaagattgtcattcaaagaacccttcaatcatgaaggctatgaacgaagccaagaaagtcgaagattaagcaaattttgatctctaaatcgaaaaaaggcgtccgcaagggatgccttttttattggttttcaaatcttgtaccgtggggatgcttccagttataaacacggactattttacccatgccatctagcactacaacatttccatcattatgtggataaatcaatggatcagaatgtgaaccaccgtcagtaaaaattcttgctggctcacctgggtattgcactgttctaactatacaatcatcaattgatagccgcctcatttgtcgaccatcatcatattttccttctaaagcagctgttggcgtatgaccagtcacaattgttttgcccgttttgttatgagccatcattttcaataaggaatcggaataccaatacttatctcgtgcccaaatacggtaaaaatcatagtcaaatttcaagccatactctatctcagagtaagtttccggatcattatactgttcatctggccgcacacccgcatgaacaaaaatcaagtgtggcgtttcatacataataggacagccttttagaaagcgataatactcactatcacgcaactcatcaggcaaaactgtactgccaaacagactaactaggctcttgccaccaccgttataaacccaaatgccatcttgatgttcctgcttctccgcaaaattgagtaacatttgctcatgattacccagtagtacgattgctccttcgcttttttgctcaattaaataatccaatacttccttcacatgctcgcggccatcaacatagtcaccgcccgcaactaattgtgcttctggaaaatctgctgttgcctgcttgattaagtctaaggtttctaagttgccatgaatatcagaaatgaagatatagttctccttcactcgatcatccaacagcgttcgattgataatttttttcatttcatactaccccatgtgctaaattaaactaacatttttttcttaattatagcagatgtacactggttctttttctatgcaatcctaaaattaacctccggcaaaaaaaaggctacaatagatatgaaaagaagtgattgcaatgtttaatgaagaaaatgcaattgatgccaaggacttacacgttgattctttcaaatatcaatcaactgaagacatgccatctgatgcttattctagctgggaagaaaaacacccaaacgccagggtattcaagcttgaatttcgcaacatcggcgaaagcaatgaatggcaggaaatgatcattatctacactgaataaataaaaagtggaagaactccaagcctagtgtgtttcttccacctttttacttattttgattttctttttccttcaatttgtgcagaatccgttcattttctttagtacgtttttcaactgctgcatcgatgatcgaatcaaaccaatgattatcagaatcatcgcttgtttgatccttcttttgaggaccttcattttttacacgtttgtcagtttcttcattaataatggaatccagccaatcaaaattatctggatcatggctcttatcagtcatttatttttcctccatttttgatttaaattaatttatttactattctttttgactataattgagttaacaagatgaaacaagaaagaagtgttcgaaatgaaaattacattcactgacaaggcgcttgactacttaaaaagacgcgaaatcttgaataaaattctaattttaatcgccgacgatggtggtggtaaatattctatcaaaggcggcggttgtgcaattggcagtcacttttccattatttatgtagacaaagttgatcctgattatccaatcaagcttgaaaacgaccaaggaatcaatatttacacttctaaatacgacaccacaatgatgggaccaaatttagtggttgactacgccaatgcatccctcaacttaaagagtgacgaaggattgcttgatggcggcgttgatatcggcaatggcgccgagttaattaaagctcaaaagaatgtaaaaatgaccggcgttgaatggcgttgctagattaagatgatcagaaaagacagtagtttgaaatcaactactgtcttttttctatagaaattgaccactattaggatcgaatccagtacgatctgccgcggtaatctttctaattaccttacatggattccccgctgcaattacattatctgggatgtcattcacaactacactgcctgcaccaataattgaattacgtccaataattgtatctggagttacgctaacccctgcacctagccagacattgtcaccaatgccgatcgaatgtgcaacacaaccaccggcttttcgctcggctggatcaaataaatggttgctggtatacaagccaaccttaggaccaaacaaaacattgtttccaatataaacaggcgcgccatctaaaatcgtgcaatcatagttggcataaaagttatccccaacatgaatattttgtccaaattcacaacgaaaattagggttcacgaagggatgctcacctgttgaaccaaagagttctttgattaatatttcttttttagcgtgatcattctcattattaatattattggtcttcaaggtagcaaggtctctcaaggtgccaaggcgaggatccgcatcattataaggacgaccagtagccatgtaattaaattttgttctaagcgacatgattctttcctttcattagttcttctatttttattatagaaaagaaaaagcgctttcgcatgtttgacgcataatatttagcacactagccctaatcttattgcttattctataatggtaaaaaagaaaggattaaagccatgaaaaacttcaacaaatttaccgctaaatttgctcgccttttacagaatctactagtagtcgcaattggtttactcgggattattctgatcatactcttattccgcgatctaattccactttgccaatcattattttcaactaagatcgaagaaagcaactccgagattatgtcagaaattatcgttttcttactcttctttgaatttactgcaatgattatttcagccttgcgtcatcacggtcacactagcatcaattttctattgggcttaggtgttactgcgctaattcgcagtctgattacttctcatagtaacatttggagtacgcttgccacttctgcttcaattttagtactagtaatcgcaatggttattttcaataaaaatctgcgtaatatgtaaaaaaactgtatcactctaggctaatgtcattggagtgatacagttttttgttttactaattaactttgcgccatgaactcattaagttgtttcttagaaaaaacattgccatatttgcatactacgtttcctttcattattgaacgtaattcacacaaccaaaaaagcatcatttattaacaatattgaaaataaataatgctttttagtaatactctgatgctgaatgccagagtcgaactggcgaccttctctttacgagggagatgctctaccaactgagctaattcagcaaactcacaacacatgaattataccaaatgtcgctaattggcgcaacgacctttttctaagctagcattcaaaaaagaacattatttccaatctaagcacaatccttgcttgtgcaattcttctggcaattgatcacgatcagtttcatgcagatcaagttttttacctgtaatctgcttagtgaatgaatcaatgcgacggttagaatcacgtaagtcataatatgtcgtaactatatcatcatagtctttaaggtctttcacatcaaagtctttcttataactaccttcaaaacaagtgaacttaagtggtaatcgtggttttaattgtggcttttgatctggcataccgacttgcatccccaacactggaaaagtcaactcaggcaaatcaagcgtcttaagcaaatccaacggatgatcgttaaccgtaccaagtggcacatagcctaagcccatactttctaccgcattagcgacattttgaaaagcaagcagcgtatcttctattgcttggaaaaagatatcagttgtgtgaacacggccgtcgtctttgtcaagttgctttctaatttgttggttacggtacaagtcaacgataaaaataaacaaatcgccttctgcaccaacatatttttggttacataacttttgaattttcttcttttcttcaggatcggtaacgtgcagtaagctagcattttgcataaacatgctggttggagtttgaccaaagacagaatacaaagtttccagttgttctttagtcaaagtttgatccttaaattttctaatagaacggtgatttaattgcgtgtcgattgtttcgttatgtatcattttcatccttcttactaataatcagtaagttcattataacaaataatatggctacttttcttcaaattcaattccgtaatctgcttgctctccgtgctcagctaaatcaagccccattaattcatcttcttttgatactctaattggaataatccttttaagtaataaaacgattatcgtcgtcatgatccctacaaatatgatagtaaataaagttcctaaaatctgagctgtaatcaaatgcaacccgccaccataaagcaagccattttcaatttgcgggttaacaatcttagtcgcaaataatcctgtcaaaatcgaacctacaattcctgaaacgccgtgacagccaaatacatcaagtggatcatctagcttcaattttggcttaatcacatgaatgaagccgtaactggctagtgtacaaataaaaccaatggcaaaggctcctgccacagtaacatagccagctgctggcgtaataccgactaatccacacaaggcacccgtacagaggccaatcatagtagtcttttctttaataaacatatccaaaaacatccaaaccacaaatgacgtaccagttgcaacagttgtagttaaaaacgcttgtgtagctacatcgcttacagttaaggcagaaccaacgttgaagccataccaaccgatccataatatactggttcccattaaaacccatggtaagttataatgcttaacctcaccatttggatcaaaatcaattcttggaccaacaaaaattgataaaaacaaggcggtaataccggcggtaatatgaactacagtcccacctgcaaaatcaagcatccccgttttggctagaattccatctggtgtccaaaccatatgaaccattgggtaataaatcaagatcgaccaaattgcgacaaatgcaagtaaaaatttaaatttcattcttccgaccaccgcaccaacaaacaacgccggcgtaataatcgagaacatcatctgaaacattaaataggtcaaaattgtgatgcctgaatccttggaataaagcgtctttaaatcaaagccgtttaaaaagacacttttactcaaaccaaatattccaccaacatccttacccaaagccaagttataaccaaaagcaataaacaaaacgattgcgacacctgtaatcatgaatactgaaatcatcgtattcacagcattcttctttgaaaccatgccaccatagaaaaaagcaagtccaggtgtcataaagaaaactaaaacactagcgacaaaaacaaatagagtgttcgtttgattaatcatctttttttctcctcaaagtaaaatagttagtcctaatattttaaattggtatatacactatttcattgatgttgcagcatatatgcttaattaaaaaatattggtttgataaaatttaattctcattatacactcatttttcttcttgtcattaattttctataaaaaataaaggtgcatagacgtatggcttctatgcacctttgcatatatttgcttttaattatttgttttcgttttcaagattgttgattgcagtttcaaccaatgcatatgcttgttgagcttggttcttagcttgaacatattcgttcaagttgtcatcaccattagtaagcacacgtgcaaatgaaatttgttcagccatcaagaagttgaacaatgaatcccacttcttgtcttcaaacttgatttccttagcagaaattctaggcatcatttcacgtgtggtattaaatgccttttccaaaatttgttcatctgcatcggttaattcacgcacattgtatgcttggtggatttggtgaacctttaaaagttcttttaataaagttcttgcttgtgcatcttttgaaactgattggttaatttttaaagccatttttacctactcttttcttttttattaacaattataccaaattgtcttcgaccatttgcttaacgcagcgtttcatttctttaatatcaagaatactgtaggcaaattcttttctaagtagttcctttggcaaatattgatcgtacttgtcgattcctggcacttcgtttggataaaccagatcaagcggatcaaagtctttatcagcttcttcgcctaaaatgcgccagaagtcatgctcatcagcatccatggcaaaatacatgaagtatggtctagatgaattaaagccacggatatttaactttttaccgcacttaattcgaattaatcgctctagtgccaaaaatgcataagtcccagtccatggaaaaagacaccacatattaccgcccagcttgatcaaattattctttggcagaccagctaaagcggcggtgtctctagcttgcgtcaagcgagctttaccattttgcatcaaatatggatacatcatcttttctgcaagtacctttttcattctctgtaaaattttaggttgaatatctccaggtacatctccaaagtaggcaggaattctaccctttacttcatggcaatatacttgatgacgcttgatatccacgtcttcgacaacccatacacgtccagcaatcgcaatcttgtctcctacaggaggtggcttaacgatcgtacctaattcttcgctgccagcgtgaacactgaattcctcgttttcttggaaaactgcgtaaaatttaaagttattcacaactcgttcaccagcaagaccaacgatcagaccaccatcttcagtccactcaatgtgacctgttttaagcaagtgtttgagcaaaacgcgataatcgtcttggctcacgttgtggaaatatgacaaagttaacacccgtgaagcaagttcagctggcgtcatttcaccgcttgaagccagcgtactcatcgtctgatgatagagcaaactatatggcaaacggttaggttcaggtggctccacccatttttcttccgcatacagttgtaccaaggcaatcccttgaagtagcggccacggaatcagttctggcaacatcgctcttgattcagggtgttcttcgcgcatgacaaagtgcatctctgatggattaccgcggcgccctgtccggcccattctttgtaaaaagccagacacagtaaatggcgcgtcaatctgaaaagcagattctagtttgccaatatcaattccaagttccagcgtagctgttgcacaagtcgtcatgtagacatcgtcatctttcattgcggcttctgcagtttcacgcaaggcttgagacaaattaccatggtgaataatgaagcggtctggctcatgattataggcacaatatgctctgagctcctgacaaacagcttcacattcttcacgactattggtaaaaacaagacactttttaccacgagtatgctcaaaaatatagccaattcctgggtcagctaattctggtgccttatcagttttcggttcgatttggctcggatcaaagtccctggaacttgcttgtggatttgttttataaaaatgttccatagataaatgccaaatctgtggttcattttgtacccttggtgtaacagtttttctgtttgaaccagcacccaaaaacttgctggcatcttctaaattaccaatagtagccgaaaggcctattctccgtggatttacattagctagttttgataaacgctcaattaaacaaaatgtttgtccaccacgatcacttctaagaaatgaatgaagttcatcaaccacaatatattttagaccaccaaaaagatgcggaatatccatgtgcttattgatcataaagctttcaagcgattccggcgtaatctgcaaaatacctgaaggatgcttgagtaacttgcgcttttgtgtttgagctacatccccatgccagcgccaaactggaatatccacatctgtgcataagtctatcagacgatcgtattggtcgttgatcaaagccttaagtggcgcaatatacagaacttttactgaatcttctggctcattataaatttccgacaagatcgggaaaaaggctgcttcagttttgcctgacgcagtcgaagccgacaatagcacattatgatcggtgttaaaaatttcttcggccgccgcaacctgaattggtcttaaacttttccagccatgttcatagatataatcttgaataaatggcgcataatgtgaaaaaacgtccatagtccatttccttaaatcttaaattcggtataatccttttccgcattatccgaaacagcctctgacttggtatagctgaattgatccgagttaagcagatcagtgatctttctatcaggattctgccaaacaatgtcgagcagctcaataaagtcacgaataatttcacgtggcgtgatattggtatccgctccaacacgggcatattcaatcttaataaattgagccaaatcatcatcagtaatcgtgcgctcataaccgtacaaattggcatgcatgtcagctagtttttcagtcaaaaccaacatttcttcagcggttaatggttcaagcttaattactggcgcatacatatcacgtgctccttcttgagcgaatttgcctgaagcaagtcggctgcgtaaagcttcgtatgaataaactccgcgacgacggtctttaactgcttgtggcgtaccacacataataatgcctaagtaccttgctttgccctgcaaggtatcgttgtacatggtcaaaatcttttcatagttgtactggcggctaattgcattcggaattttatagatattaaccaattcatcaatcataatcattaaaccagcatagcccgcttgtctaaagaaagtcgcaaataactttaaatattcataccaatcactatcactaataatgatatcaacgcctaattcctttttagcctcagtcttatggctatattctcctctgaaccacttgactactttagccttagtctcatcatcaccactcatataagcgtgatagtacatgttcagcaatttagcaaaatcaaatccatgaactaattcgtttaatgaagaaatgacgccatagattttctggtcaactgcttgctcaaatttaggatcatcattatttaagcctgtttcttgcgaaacttgcatctgcactgaattaatccagcgatctagaatcaaagtcaaggcaccgccttcaggcctagtcttagttgataagttctgaattaattcacggtatgttgctaaaccctgtccttttgatccttgcagccgacgttcaggtgataaatcaccatctacaacaacaaaatttttatccatcacatagttacggatcgtttgaagtaaaaagctttttcctgagccataacgacccacgataaaacgaaagcttgctccgccttcttgaataacatccacatcgtgtaatagggcctcaatctcggcctttctccccacggtaatataaggtaaccctattcttggcactaccccaccctttaatgaattaaggacagtttgcgcaattctttttggtactcttcttttttgtggcatgatttcatcccttcaaaaacatatcttttaagtcatctacataatcggtaattacttgtggttggtcctgttcgttattttctaaaaccacatcaccgaattcatcaaataatttttcattaatattatccatcaaaattgatgccattaaatggtgctgcttcaaataggtctgccaaggctgctgcatcagcaatgcagttaagaaaaacatttcattttcatctaagccatattcattatcaactttgacagtttcatctgcttgtttttctacttcttcttgcgcttctgcctgctctagctgcttttcctcatccgttaacaaactatcacgcgtcttcgaagcattggcccgaatttgatccaaatcggagaaatcaatcttaatctgatcaatctgcgcctttttttcttgaatgtgatattcagcaatccccgcgtcaattgccttaagtacagcttgatcaataaatcgcggcttaatcgaccgacctagtttaaattctgttcgcgccactctatctaattcatggagaaaattatttaaattaacccgctgacggctgatttgttgatcacaatgaatttgccattttccttggtaaaaatgatactttcttactgcatcaatctgatggtcagctacttgttgttgtcgcagataaaaaacactgcctacaaagattggcttttcaattatatcaggcttgcccacaaacgcactgtaatacgcaatgccgtattttttagcatccagcagctccagccacacgtaacgcaacagttgaacaaataacttttcattcttatacgcgtggtgctagttaaatcgttttagttaataaaaaagtccaatcttgttagactcgacttgtaaatagtaataatagaaaagagtctgatctgattgaactgccttaagcttaagcgttttagccaccatttacaagttagttttaaagatttagtgataatttgtcggcactggtatcgtttgtatgcaccggctgagtttactcatcggcgaaatattgatcaaattaaaactacggacagtctgattttggctttacttatctggcaagctaagacaggaattgaatcacaaagaagattctgtgaatgtttcaattgtttatcacactcacgttttaatcggcgttcacgtcagctattgcaattgatttatcagatacggcaagaaatgaataaaaaggttgacctgaatggacagttcttgatcattgacagctttccggtacctgtttgccaaccaattcgaaactatcgtgctaaaatttttcgcggttatgccaacattggttataaggccaccaagaaaatttacttctatggtttcaaagttcatgccattgttagcgatgacggttacattcttgattatgtcgtaacaaaggcatcagttcatgatgccagggagacagttgaactgatagaaaatacccatccatctaattactatcttcttggcgacgaaggctatttaggcaaagaactgcatcaacagctaaaacaaatgggttacgaactttggacaccatatcgtaaaaatatgacaggagctaaaaagcacaatgatcatcaattgatggctattcgcagaacaattgaaagcgacttttcgcttctgacctattacaatgccgagaacaatcgagcacgtagtctgataggctttcaaagccggttggaaattgcaattttagcttataatttggcttattgtctagaacgatttaactagcaccacgcgtattcttattaataactttagatgaattccaataagtcgttttctttgcaaagactgctgctaactcttgcgcagtaaatttttctggatggtgtaaaacctcataatcatgatcacgcttaatctcagatgcaaagcgctgcttaataatcttttcgtctaaatcataataaagaacataatctttgagccagtcttgtaaatatacatcaatactaatgtcaaattgtcgcacatatttttcttcaaattctaacagcttttcatatccatcttgtgcgtcatcaacaccaatattgttcagtaattcataaatataaacaaaggcataggatgtactcgttttttcaaaaacatgctggcgaatcttgctgcgccaagtaaagtaacttctaagctgcccagtattcatatcatgataagttggataaaaacgcttaaaggcaaaaaattcaggataatcatcatcatagtcggccatcatcctagcctgttgataaaaattcttagctcggccacgactgggcaaaatactgtagtcataaacttctagcatctttctaattctatctggaaccagactattgttatgcttcttgcgaagattttcacttggtttaattgcttgggcttgatagcggtcatctactttatctggtgcaatataaaaatattgattctgggcgatatttacttcatcaccattcatcgccagtttaaaagcaaaatcaagtgcttttttgagtgaatcttcactaactttttctaatattgccccaacccaatctgccgccttgatcttcattggatcagtgaagccaggcaaatctcttattagtgcagccattgcaccacatttcaggtccaatatactctgaccttgcccacgtgataatatcgcaaaataaccactatcaactggtgacattaaaacgtaaacgctagtggaacctggtacagcaggcttaaatttcaaaccatatttggcatagacatatttgaagagttgatttgaatccattttgtctccttttttcgcacgtacgttcattatatcatcgatttattttttaccaaagtcacgcatgtcagctcctcatgtacatttttaagtttcataaattttatatttttatatttgtgtggttattaacaaacaattatgttactatagtttatgtaagttattgaaagcgtttttataaaagcttcctagagaggacaaaaacttaatatgagtacaaaagaacgttattctcaagatgaattaagaaaagataatccaatgtttagccgcactcgtgccactattgaaagtgcattttacggcaacaatgtccacgaagtaaccagtgttgcagaagcttataacttagctaagaagcaatcaggcgttattgttactgacttgccaatcttacacactaaggaattaggtttgccacatggcgcaacccaattggtttacaaccacggcaagattttaggtagaactgctagcgcccgtcactttgttgacaatcctaatgaagatgctgaagcattggacggcaacctacgtgaagatatttacaaggggcatgaacaaaagtacttaaaggctactgttttagtaggtcttgacccatcattcactgttaaggctcacattatgatgccagaagatcaagccttcaaccttctttcatacatcctcaacttccacttcttcgacgatgaagctgaaaaattatacgaaaagtcaaagttctacgatgaaccagacatttacttctacttcgatccaaatgttcaagacgaagattaccctaagggcttaggcgtgtttgacgctccacataactgtgccgctgtatttaaccttcgctacttcggtgaattgaagaagggtaccttaaccttagcttgggctatcgctcaccgtcacggctacactgcttgtcacggtggtgaaaagtcattccactttgacgataaagacgacaagacctttgcattctacggcttatcaggttcaggtaagtcaactttgactcacgaaatgtacgatggtaaatatgacatcactgttttacacgatgatgccttcattatttcacgtgaagacggttcttcagtagccttagagccttcatactttgacaagactcacgactacccagctggccaccacgagactaaatactacaccactattatgaactgtgatgtaactttagacaaagacggcaagaaagtcatcgtaactgaagacttacgtaacaacaacggtcgtgttatcaagacccgctacactagtcctcaccgtgtagactttgaaaagtcaccaattactgcattgttctggattatgaaggacggttcattacctccaatcatcaagatcgatgacccagtattggcaactactatgggttgtactttagcaaccaagcgtacttcagctgaaaacttacctaagggctttgacatgaatactttggttattgaaccattcgcagacccattcagagcttacccagtttcaggtgactacagagacttcaaggaattgttcactaagcgtggtgctagttgctacagcttgaacaccgacgcatttatgggtaaagacattcctaaggaagttactaagaagttaattgaagacttagctaacggcaatatcaaagacagtgacttcaagccatttggtaacttcaagggtgtatcatacttacctattgaaggctacgaagttcaccttgaagacccagaataccaaaagaccttgaaggatagaatgcaagatcgtttgaactggctcaacaagtacgatgaagaacacccagaaactccaattcaagatgaagctaagaagaccttggaagctatcatcaaggaattgagctaatattaaggaaatgaattagtgtctcattcaattaaaatttaatttcttaatgacgaaaagacgagagttgaaattcagctcccgtcttttttattgctcaatgtaattttgcttctgtagtttggcatctatcagtttataaacttgcactttattctcttgtgcaagttgtggattatagttatgtgctatttcaatgacaatagccggcaattggtagattatcttatgaatggcatcactatttttagggtctaaacttgaacaaatctcatcaagcaaatatatcttcttagaacgaattagacctctaactaaagcaagtcgttgtgcctgaccacctgataaattgttcgcgtcatctgaaattaatttatctaaaaaatcattgccaaactcatgaatcagtcccatcttttttgcttcatgaagcattagatcatcaggtatgttttgcagaagtgatagattctccctcactgtaccttggaataaccagattctttgcgagatcttgatgaaatcggcaggattaatttgatgaccagcaaaggtgatttcaccgttatacttcagattattagcaatacaattaattaatgtacttttcccaatgcctgaagccccagtaacaatgatcttgtcatgatcacgcaaagttaaatttataccatctaaaattttcttatcaccatatgaaaaagacaaatcttttattttcaaaatagcttgagagtcatgattatcttgtttaacactttcactttcttcaaaattatagctttttatttttctaattgcatcggtgctatgaatttgagtctgatacaaagcaattgttcttagatatcccacaaccctatcagctgacaaacttaaagttataatggccgctaccgttacgttaaaccagcctctctgcataaaaagcaagccaataaaaattggtagcaatagtgtaactaaagagattaaccatgcaatgaattgtacctggaattgacaattattcatcttacgatatttgtcttcctcattaaccaagattcgatcaaatcgtttaaagaaaagatgtctgacaccaaaattcagtatttctaagcgtccttcaaatatatccttcattgcctgaatcaactgtgagttagatttattccatttttcggttttctcattcatcctcttcttgccaatatagcttggaatcagggttagcgctgaaagaagcaaataaataattcccaaaatcagattagtttctacaacaactattgccgatgcaaccacattaaatacaaactgaactatgtcagttatcccaaagaaatatttttgttcaatttctttagcagtaccactaatcgaattgattacatctgctcctcttgcttgcttcatgtctgaattagcaaatttagaataaaaatattcttgctttaaagcaatatttaatagcatcacaattctattttgaaccaaataaaacaagagcatggctatgtagactatcagatatgcgccaaaggctaagccaataaatttataaacgtggtcaatgttactaaaattgatattagttaattgtccaaacagtacagcatttaataccccttcaaatgctgaaatggccgataaaaccagaaaaactatttgtaaatatattggaacatgttttactacccatttaaaatttatttgttgtgtgttcattgtttaatacccacatatttctcataatcaacaagccaatcttcatcatttttataagaatgattcatacactttttaaacccaattgctttaaatcatcttcatctttagtttctaacaattgtcgctcttctagagacaagtgatacttattcactaaggcatcaatattctccaaagaaatatttttaccatcagaaagatcctttcttcataccttcagacattactatacctcctattttctctcgttaagtaatgcataattttcaacttgcaatttactgtgtatgggattgatatcaatgcttcccataattccccaaatgcttataataataacagtaagtattctcttattttttaatttcaaagccaggaattcattatgtacggtcaaaaatttaaagcacttcgtcttcaacaacatatttcactagagcaagctgctaacagagttatctctccatcgactttatccagatgggagaataataagattgatattcgcttcaatttagttattaagcttttagacaatattcatataaacctaaaagagtttactaattactgcaaaattaatcatagtaatccatttgttgcgaaagtggctatgtactatgaagccaacgatgatcgtcatattttgcaattaatacaaagcaagaaaaaagaataccaaaattcacataatcaatttgatttacttctactagctatcgcatgtaattgttattacgatctaactgataacaatgttttcccagtgagctatcaaaagaaattattctacattttatctaacattgaatattggacagagatgtacatcaatgtttttggtaacactgtttttctctatgacagcaaggaactatatagtatttcaatcagaattcttaaaaatttaaattctaatacatttaatgattttcaagaatattattatgctttatcctctgtcatcaacgccctaaccgctctaattatcaaaaatcccaaattagcatcacagcttttaactaaaatagagaaagtttcaattcctaaaccaatctcttacttaaaaattagaactaatgtcctcaagtatcttttagattaccgtttaggcaaaacagatgaaaagcttatctcaattaagctagaaaatttaaagtggttaggattaacagatattgcaaaagacttaactttcttctttaaccgtataaaaaatgatcgttcacctctttcctaattcatttgcctattatattaccctcatttttatctaattgatttttctttgcaaatatgcaaaattatttttagcaagaataaaaaagcctattaaatctaggtcaatgtcattaagttaagacattgacaaattatcgacttggacttttaagatcattcatttgcgatttatcgcatttgaatgctcttttttcatgccaaataaacccaaatcttgtttagaaattaggctacacgatataaataatatacagctgatttgggtttgagatttcttttgtcttttcgtcctggtctgatcggaattgtgtaatgactaatttgaataagaatctttttaaagatttcagttgaagaagaaattatatacatagcctggatgacaaaacatgactgtttgaaattgatcgcatattgatacttgcattttttttgtggtacatatgcttgagcatcaatttgactgactgcgttaaacataatcatgtgggcatagatctccatttcaataaatctatcctgcttggaatgaaactgtacgctacctaaagcatatttcaactttttgaatgaagtttcaatgccccagcgcaaatggtagatttctttgatcctttttaagggataatcggctctatttagattagttagaacaacttcccattcttctttgcctgatttaggatcattaattctaaatttacaggcacgaaattttattgtacataactctccaaagtcccagctgccatctttggtatttttagaccgatattttatatattgacggtaatgatggttaaccaaatgaacgttttctgtagccttatgggtttcataataataattagaggtagtcacccagcaagctatatccttatcacactcttgattaggcaactcagctacttccttaaatgcgccatatcccgttttagtacgtatgacataataacagttaggcaggcgattacaattttcaatcatgttaaagccggtataacctcgatccatagtaactatatatggtccgcaatttagctttttaagcatttgaacggcggctttacgttcatccatctttgacttaggctgaaagatgcagtcttgataagtattatttaacaggtcatagagtgcattaacatgaatttggcaatatggctttcctttatgattgagatttccaacgatattctctgatttaggattccagatttgattaaaatcagacccatcaatggcaaatatacgatatttatgatcaaataactggatattaaataaattctgattaaatacagttagaatatgcttaaaacatgcgggtgaaagctgacctttgcgttggacataagcggaagtactgactactttatcgttatttttaatagctttttggccaaaagctctaaacaactcactggtcaaatcttttccttgcatattaatagtagttttaatgactgtagctgcatctaaaaaccgcttcctagtgaaggcatgaggatcatcgataaaatcatgaatatgctttccagtatcattgataatttgatcaagacgatctaaaatatttctgtgaagggctttcataattaacaccagctttctggcaataattttgaaggtttaataatttaatcagagggcgaaaaggtaggttcttttcgcctttattttatgcaaaaaaagaaccaaatcataatgattcggttctacagagattagattcaatttgtcaatgtcttaacttaatgacattgaaatctaggtgtttacaaaccctgatttaataggtcttttatgcgtcttttttattgctcaatgtaattttgcgccttagttaaaatatccatcttctcatgttcagttaaatacttttgtgcttctgccaaattgacccatttactagctaaaatttcttctttttgaatgttaacctcttgtcctgcaacatagctagcaacaaaataaactactgtcttagctttatcaacagtcaactgatattctgttttttctctaaaagtaaagtcaaaattcggctttaaaccaacttcttcaaaaacttctcttctagcagcttcctcagctgtctcattattttctaaatggccttttggaaagccccaattatgatttacgacgctctgcacgatcaaatatttcagctcgccgcttctacgttctctgtaaataactgcacctgcagaatgttccatcttcatttttgtcacccaacctttatattgcataattattaaatatttattaacgtatgtcaagcaattgtaatcaaaaaaatgaccagatctttgacgatctagtcactttattcgcagacgaaattattaagttctattggtagaatattttaagttacttcttcaagttcttttcgcagtattccttgaccttgtcatcatcggccttaagaatccattcaactgcagcctcagtcttcatggtgtctcgaccatttacttccatttcgtggtcccaaatagcgtcacgaataggcatttcattacccttagcccagtcaaaaacttgatccatatttctatcaattaatgcagtttcttcaatttcttttgcatctgccataattaaaagcttcctttctgataacgactttattgtagttctattagctacaactgttaacaaaaagggacttttttatttaaattctaatttttgccattaactgcttcatcagccttattcactacactaaccgcattaagtgaacgaggataaccaatgaatggtacgttttgttcaatgaccttcatcaagaattccttgtcattgcctaatttgatatttgcttgagcatgggccatcaattgaggttcacagccaccttgagctgcaatataacagaaggtaatcatttcacagtcattgtcatccaagccttttctagtgtagtaatcgccaaagcaattatcaactaaccacttattgattgttcccttcttggcaaaacccttcatttgtggaccaaacaagcgcatttgagtttcctcacccttttcaaggcgattgtctagtgtagtagttgcttgacccgcaagaggtaattcaacgccgcgcttagttaaaacatcattagtaatcttgaaaaatggggaaactctacccaaacctaaataatcaaccgcttgatataaacttccttagcttcaactgggttaacaccattgtctagtacgactggaagcattatttcatattcttccttgccttgcatccccaacaaataagctaaagttgacaacatcttagtccggtcgggcaaatcaacgtctttttgcacttcgtcaaaagcaaaatgattaattctttccaaagcttctggatcagtagccttcaataagttggcatgtactctttatgcatcttctttaattgacataataaattcctttctaaacgcttatctctactatttatttaagtacgattgagtctaaaagaaaaatatctattttttattctgcaatataacttattcttatcaaaaaaatatcctaaaggctttttgccttcaggatatttctattaggttatttaattagtttttcttgtctgcttcagcatcatggtatgacttaacgatttcatcaactaattctggatcatctttcaaatcagtagtttctacaatgacatccttcaagtcttcatctttaagcatttgcatcaacttaacgctttccttgtcgttaggttcatcaaagtgataaattctaccaacagtttccatcaatgcactgtagtccaaacctctgtccttcaattcacggattggacggataaatctttcattgtagcctaacttacggattggagttctaccaacacgagcaatatcatctgaaatatatgggttttggaatctgctcaaaatcttgttgtggtattcttccaaactttcttcggtgaattccttgttccacttgtggtaaagaagtgaacgggtttcactcaagacacgcttaacttgctttaaaacaaatggatccttaatagcatccccaatagtgtcatagccaaggctcttgccagtataagcaacagttgcgtgtcccgtgttaactgagaataactttctttcgatgtaaggttcaaggtctggtgcatagtcaacgccctttaacttgatatccttgttcttcatttggctttcgtcaataacccattccttgaagtcctcaactgagacaaacaatggatcgtcattatgttggataggaacaattctgtctacagctgcgttagggaagccaatgtacttgtctagttcaggcttaacgtcatcgtccaagtgcttataaacttcttcttttaagtgttctgaaccgccaatcatgttttcacaagcaatcacatcaagtggagtagtgttgcctgattgaattctagcagttaatcctttggcaattaatggagcaatgattgccaaaatctttggaccaatggcggtagttatcatatcggttgatttaattgcttcaactaccttgtctggatccttagcattgttaattccatcaacatttgaaacatgaattctcttcttaccaggtgcggctaattcaatgtcatattcaccacgcttgtttaattcatcaataatagtttcattaacatcaacgaagtcaatgccaaaaccattatctgctaaagtttcaccaataaatccacgaccaatattacctgcgccaaaatgtactgctctcatgtttaatctcctacgttctttaataaatcaataatttcttctggtgtttgtgcgtctgcaagctttgcaacgttggaaacatcactacagaaaatagcaatctgtgacaaaatatttaagtgttcattgttcaaaccagcaatcccaaagacaacggttaccaattgctcggtatcatccttagggtcactaaaatcaacgcccattggaatttggactaccgaaattccagtttttttaatgtgcttcttaccttcgtcagttccgtgagggatggcgatgaaattacccatataagtcgacacatcttcattacgggcaagcattgaatcaatatactctggttcgacacagccgccatcaactaataattgaccggccattctaattgcttgatcccgcgttggtacgtcttgattaagtttgatcatttttggatctaattgtaatgccatttagctcatccctttctaattcaacttttgaatagcttcgccaagctttttatctttaagtaaatcatcaacaactagggtttgaatatcactgtatctgacagccaagttcttattagcagctggagtaacaattactaagtgacttggatcatcagtcaattcgttgattcttactgccttaacaggagtagtcttaccagccttcttaattgcgtcattgaataaactagttgccatagtagcggtacctaagtgttgatcgtgacggatgaagtccacttctttaactttactgaagtcgattccttcaagtgaaccaaccttcttaactggtttttcagcctttggcttatcttctacttgagttaaagctttgaagctagctacgattgtgtcatatttcggactactcaagaagttgccaaccgccacgtgcattgcatgtggagtcttttgtaaagcgcggtcagctaattcttcttgcgtgatgatcaacaaaccatcttcatctttcaagtttctaacagcggtattggttactgaaaccttaatgccagccttcttgaatttatcacgcaaaagtgaagcacccatagcagatgaacccatacctgcgtcacaagcaaagataattttcttaacattggcatatgacttaactgattcatgtgcatcttcagcttccggcattgattgacctttagattgggccttcatggcttgcatttgggcttgttttgcttctaactcatcaccagtactcttgtcgtttttaagaataattgcggcaataatgaatgaaacaactgcggcgccaagaacaccaacaatattaccgaaataagcatcctttgcggaaacaagcaagatagctaaaattgaaccaggtgaagcagctgcttttaatccaccaccaagagtagtgaataagaaagtaccagtaacaccaccaatagcggctaaaatcaatgatggtttcattaatacatatgggaagtaaatttcatgaaccccaccaaagaattcaatgatggcagcaccaggagctgagctctttgacttacccttgccaaataaagtaaaggcaagcaagattccaagtcctggacctgggtttgattccattaagaacaaaactgacttaccaacttgtgcagcttgttggatacctaatggaactaagatcccgttaccaatagcgttgttcaagaacaaaactttggcaggttcaataatgatgttggctaatggtagtaagtgaactctaataattgcatttactcctgcactagcccattgactgccaacttccataatcggtccaatgataaagaaggcgaaaatcgcagcgatcatgcctagaataccaagtgaaaagttattgtagatcatttcaaaaccagatttaatcttgtcctggaatacttgatctagtttcttcaataaccatgcactaagcggacccataatcatggcacctaagaacattggttgatcagtaccaacaattacacctaatgtaccgattgcaccagcaatggcaccacgttcttcataaaccatgcgaccacctgtataaccaattaacagtggcaacaggtaatgaagcattggttgaactaagttattaatttctttgttagggaaccaaccgtgtggatacataaagaatgcagcggtaagtccccaagcgataatggcaccgatattcggcatgatcataccggataaagctgtaccaaatttttgaaccttcactttaacagaagatttactttttgcttgagccattttcttcttcctctctcatcaacttacatttttattctaagtcaatcagtaagcgcttacaatgaaatgaaaatagaactctggcacacttttgtgccagagtctgagtttacctattctattaagcttttgaactattggttacctagtaaccgatctttgaggtcttgtaaaaaaagtgccgcaattgcttctttaatttctttttgactgccatttgtaaataaatctaagttttgactagacatgataatcatgctggaaatagtactcattacccgctgttcgggtgcagtaagattgtctggtgccagcatcaaaagaactcttttgacttgaatggtatcatgatccattgattggagcgagatttcattatctaagtcaaacatggtaaatgaacagcgtgtaatttctggactacgtgtgtgtagcaatgcgatatggctgttagggatgccaactggtgccattcgtacacgtttgagaagatttttggcaacgggcatttgcttacgaattagtgttgaatccgaatgggctaaacattcctgaattactgcaattaagtcttgcgaattgtattccagttgttgaatcttgattccgttgactagctccgagcaaaataatgtactaatcgatagcttagcaagttgttcgactgaatggggatgtttttcttcaactacctgtttagctggaactggttgaggatatttttgttcataatcttttaagtaagcgcggatttttattaattcatcatcaagcagtaatggactaacaagtaaataatctcttgagaagcccttcaatctcaaggttgaaaaaataagattgtaatttgacaagtctatttgatttaaggcagaaacacggctggttttgacttctttgatttcagaaaattctctttttagtttggcacctaagattgccgacgttccaatgccattttcacaaattactagggccgataaattacgctgctgattgcgactcgtgtattcattggcaaaataaagcaagatcaactgcaactctgacgctgtcaaataattttctggaaacgctaaatgccaatatttttgaatagctagatataaatcaggaaacttttgactaaggcctgccagaatttcaataggtgtatctggtaaaagagctactttatgttgtactaaaccaataacgtgtttcgtcactttagtcataaaactatgatctttttgaaaatcccaatgcatttcttcagaaacgtgttgaacgaattcttttactttgactgagattgctaattcgcgctcattataagtcaagtaagtgttgtgataatcacatgataataacttattagctaagtatgagacatcattttggtcaacctcaacttgccgcttttgcgcaaacaaggccataaaacggtaaacataaccctgatatttaagtgaatcagcactggggtggataaaatctagcttgcatcccgccagagttctttttatcgttaccgcaaaagttaaaattaactcaatcagcttttggtcactgtctagcttaattttaccaaacacgctttttttaagacaatcagcaacctctactagcaaagccttatcaatcattgtcaaaaacatgtctttgcttgtcgtttcattatgcagatacttaaaaaagttatattcattgatctgattgagcataatatcaactaaaacctgacgccgtattttttcaggcgcctgaattaacagtcccacaccctttttgcggatcaagtcaatatgatatcgttttagcgacctttcaaccgtattcaaatcactttgaatcgttgcttcactgacattcaggtcaagcgcaaattgaataattttacatggctccgtacttaaaagcaacttagctgcaattatcttctctcttttagctaccgaaattacattttgactgtgagattgttgcacagattgcttaatttcttgtaattgctttgaatcgccagataaaaaatattttcctttttgattttcaattttaaagtcgttcttctttaaatcgccaaattcgcgataaaccgtccggcggctgatctttagactctcttcaatttgtttgatacttaccccactcggatttcccaacaaaatttgaagaatgtgcttttgccgttgtgttaaaaacatcccatcatcctcgcttacgtttaagtttattatacttgaacgcaaaaaaagaagacagatctcaaatctgccttcttgaggatatttatttacatattaattattcaacagtaacactcttagcaaggttacgtggcttgtcaacatccaaacccttatcctttgaagcgtagtaggcaagaagttgagttggaactactgtcaaaagtgctgacatgtagtaattaatttctggcaacacgatcgtgtcatcactatttgcgaattccttgcctacaatagtaattactgaagcaccacgtgaagcaacttcttgaatattaccacgagtaagatctgcagtaactggatcgttaatcaaggcaataactggagtgccatcttcgatcaaggaaatggtaccgtgcttaagttcagctgcagcaaagccttcagtttgaatgtatgaaacttccttcaacttcaaagcaccttcaagtgcaacagcgtgatcaataccacgaccaatgtagaatgcgtttcttgattttacaatatattgatcagctaattccttaagcttttctttaccgtcaacaatttgttggataccttcagcagcgatggctaaatcatgttgtaagtcccaatccttagcatcttgattaccaagtttttcaccaagtgccttagctaaaatagcttgtaaggcaacttgtgcagtgtaagccttagttgaagcaacggcaatttcaggacctgcacctaaaagcattgtgtagttagcttcacgtgataaagttgagccttcaacgttagtcatagtcaaacttggaataccacgcttgttagcttccttcaataccacgcgtgagtcagcagtttcacctgattgagtcaagaaaataaagaatgggtgcttgctcatcattgggaagtggtaaccagcttctgaagcgtaaccaacttcggtaggaataccagtgtagtgttcaaaaatagttttaccaactaaacctgcatgataactagtacctgcagcaaagatataaaggcgatcagccttagaaatagcatcaataatatcttgatctacctttggttcaccattttcgtcaaggtagttttgtgacatgtgacgcattacgcctggttgttcatcgatttcttttaacatgtagaattcgtaagtaccctttgaagctgcgttagggtcgatgttcaaaacgtgaggttcacggtctacctttttgccatcaacagtttcaatagtgtaagaatccttggtaatgtcaccaacatcaccatcttgcaagtcaacaaaagtcttagtttggtcaagaacagaaatagcatctgaagcaatgatgttaaagccatcaccgattcccagcatcattggtgacttgttcttagcaataaatacgtggtctggttctgtgttgtcaacaagcaagaaagcatatgaacccttaaccaacttcaaagcttccttaaatgctgaaaaagcgtctaagttcttatcacgtgcaattttaccgatcaattgaacaactacttcagtatcagtatctgagtggaacttaaccccttgcaagtacttttcctttaattctgtgtagttttcaatcacaccattgtgaactagatagaaacgcttggtttcatcaaaatgagggtgagcgttatctacagttggcttaccgtgggttgcccaacgagtatgaccaataccaactaaaccttgttcatctggagtcaacttttccttcaagttagaaatacgaccaacagccttagttaagtattcgttaccatttaaatcatttaagtaaatgccagctgaatcgtaaccacgatattccaagttggttaatccatttaaaataatatctcttgcaggcttacctacaactccgacaattccacacataattttctcctttggtctagtttgctttgaagtaatggactagcttatttttattgttacagtaggtataatagtctttttgcaaaaatcggtcaagtacaaatattcaaaattggtattataattttaagcataaaaaatggctaccagaatttgctccgatagccatttttacttaagtcaattttaacttttattacttgtttttgatacccttaccttcatagcagtctctcatcaattgagaaatttgactaattaatggagctgatgggttagtaacagtgttttggtcgccataagcttcaacagctaattggtccaccttcttgtcaaactcagccttatcaacgccataatccttgaaggccatcttaataccaactgattcagccaaatcaataattttctgaactaatttttcaattaattcagcatcacttgaaccagttaagccgattgctctagcaatttcagcatagtcgctttcagcacggtaaactgagtaatgtggccacatagcaagtttttctggacgcttagcattaaagcgaatgacttgtggcaaagcaattgcgtcactgacgccacttggaatatcaaaagttgaacctacggtatgagcaattgagtgttccaagccaaggaaggcatttgaataagccattccagcaatcgtagctgcatcatgcattctctttctagcatcaagatcgccatcgtaagacttcttcaagttagcgaaaattgctttaatagcttcaagtgaccaaccacgagtgaagtcagttgccatggttgaaacataactttcaattgcgtgacctaatgcttcaaaacctgaccaagcaattaaacgtttgggcagcgtttgcacaaattgatcatcaacaattgaaacatcaggtgttaaagcatagtcacataaggtatgtttaattccagttttggcatcggaaataatagcaattggggaaacttctgaaccggtacctgaagtagttggaatacatacaagttggacaccattaatctttgggaaacggactactctttttctaatgtctaagaatttttggtaagcctcttcaaaactcatttctgggttttcgtagaataagcgcattgctttagcagcgtccattactgaaccaccaccgatagcaattacaacgtctggcttgaagatgttcattctgtgaacaccatccttgatcacatcagtattaggatcaagagttacagccttaaagacttcatattctttttgacctaaacgcttagaaatgatatcagtaacttcatcagcaaagccttggtcagctacaccttcatcagttacgatgaagaaacggttaacgtttggcatgtgacgaaggtagttagcagcgttatgttcgaagtaagtctttgatggtacctttacccattgcatgttatcacggcgtctagccactgttttgatgtttaacaagtccttagcaccaatgttgtgtgagaaggtattggcaccatatgaaccagtacccaaggtaagtgatggcaacatattgttgtaaaggtcaccgataccaccgagtgcagctggtgagttgactaagatacggcaagcatccatcttcatggcaaattcatcaataatcttcttgtcatttgagtgaagaccagcggtgtgacctcgaccaccatagttcaataaatcggtacaaatcttaaatgcatcgtcatggttcttagcacggtacaaagtgaagactggtgaaagcttttcagctgatagtgggaagtttctacctacgcctttatattcagcgataattactttagttgtctttggcacatccacaccacaaagcttggcaatttcataagctgacttaccagctactggaccagcaaccgtaccacgacgaggatcaataaagtgttcctcaaacttcttaatttctcctttgtttaagaagtagcagtttcacttcttaaattcttctttaactttgtcataaatttcagtatcaacgacaactgaattttcagaagcacaaaccataccgttatcaaagttctttgataaaacaatgtcataaactgcacggtcaatattagcagtcttttcaatgtaagaaggaccattaccaggaccaacaccaatagctggcttgcctgatgaataagcagctttaaccatacctggaccaccagttgccaaaatagtttgaacacctgggttagtcatcaaatcggtcgttgcatcaaggcttggttcttcaatccattgaacggcatccgcaggagcacctgcagcaacagcagccgcacgaatgattttaccagtttctacacaacatttttgagcctgtgggtggaaaccaaagataatggtatttctcgtcttcaaagcaagcattgccttgaaaataacagttgaagttgggttagttactggagtaacacctgcaataacacctttaggttcagcaatcttagtcaaacctaattccttgtcttcttcaatatacgccgacggtcttttcgtgacgcaaactgttccagatattttctgaagcatacatattcttggtagttttatcttcaactacaccacgtttagtttcttcaacagccattttagctagtgggtaagcattttgttcacctgcagtagcaactgcttcacagatcttatcaacttgttcttgtgtgaagttagccatttgatctaaagcgacatgtgatttctttactaagttatcgaccatgtcgtagatttgctttttcttttcgtcctctgtaagagtctctttttgttgtgtcttagccattgtattattacctctaagatctactaattcttgtgaactaatttacaatgtcaactatagcacaataactttatttgtaaatgcatgaatttatgaaaatagtgaattaacaaagattcacatttcctcataattttgctctaatgcaaatgaaagctattccttaattatttgtttgtgaattaacaaacttatttttaaaaaacagatttttgatatttttttaaatctaactatagagtctggtcatactaattgataatgataaaatattaagtatatgtgaaaagattgagaacattggggggcttatatgagtgagaaaaaaacacagaccgcttctggttataaacgaaccctaagcaatgcacacattcagttaattgctttaggtggaacaattgggaccggcctttttctgggggttggagacagtattcaccgcgccggtcctagcgttatcctgatatatattattgtcggtatcttcctcttcctgctaatgcgggcactgggagaactaattatgtccgacttgaacaagcacacatatattgattttattgaacaatatttgggtaaaaatattggctttatcacaggctatttgtattggttaagttggattaccttgggtatggccgaaaccacggccctaggaatttacttcaagtattggtttccaacactgaaaccttggattccaggaattattaccattgtgatcttgctgttaatcaatttaatttcagctcgtgtctttggcaacttggaattcagttttgccattatcaaaattgtcacgattattgccttcgtcatcttgatcctttacttactagtaactggtggcaaaaccagctttggtcctgttagctttgctaaccttgacgatcatggcggcttcttcgcccgtggcagtaaaggattcttacaaggatttcaaatggtaatcttcagctttattggagttgaattaattggtttaaccgcggctgaagcacaaaagccagagacaacgttgaagcgagcaatcaatcaattaccaattcgaattattttgttctatgtcatggctattttaggaattttgttagtaattccatggtccaaagttgctactaacgctagtccatttgttgaggccttaggtgctactggtattaaaaatgctagttctattattaattttgtagttatttcagccgccgtctcatcaactaacagttttttgtatagtgctggtcgattacttttctctgttacttttgacggtaaaggaaaatggaataaaacttttggacatttatcaagaaggcagcttccacaaaatgcattgactttatccgcattattgatgggatgtgcaccactaatcaccttggttattggcgatcaggcctttaattttatctcatcaacttcaactagtatgtttttaatcatctggagtttgatgattttaactcacatggcttacaggagaaaaacagcagctaatcagctaaacgattttcaaatgccaggttacccttatatcgattatgtaatcttgtcattcttcgttttaatgattatcctgctattgattttaccaagctaccgagtaccaatggtcgctgcaattgcaatctttattgttttatacatcatttccaaaatttggagtaatgaaaaagctgtttaaagcaaaaagtcgagttttttagctcgaccttttattttgcaatttttttaattattttagcaggatttccggcaactaccgtattagctggcacatctttggttacaacggcattagccgctacaacggcgtttttacctaccgtaacgccaggcaatatcgttgctttagcgccaatccaggcgttttgtttgataacaactggctttaattccagttcttttctatgctgtggatccagcttgtgattaactgaaatcaggtaggctccaggcccaatcaacacatcgttctcaattgtaatcccgcctaagtcgaccatcatcacattggcattaataaacacgcgctcgcctaatttgatgttgtgcccataatcagaataaaatggtaaccgaatctctatactagcagctattttttgaccaattatttcactaatcaattgtctaacttcacagctacaatgccgttgtgtatttaaattctgcaataatcgctgattctgttgggctagttttcgacgtaaatcgtgatcttctgtttccattattaccactcctttttcttgctctacttcagtttaaagggtaagcttatcaatgtgcaaagcttataaggtatgaagtataataacaattgtttataggtgatttaaatggaattacgtgttttaaattattttgtcgctacagcgcaagaattaaatatgacgcgagctgcacaaaaactattagtctcacaacctgctttatcgcgtcagatagcagatttagaggatgaattaggcgttaagttattcaaccgccagccgcggcacttaaccttaactcctgcaggacagtatttatatgaacaagcaaaagaaattcttactttagcttccaaaaccaagagtaacctacaatctagtgctgtcatcagtggtgacctaactattgctgccggcgaaagttttgccatgcaacgtctaatgaatatcgtcagcaacattattcgggattatcctacagttaaaattcatattctaagtggcgattatgaatttgcagaaaggcgtttagatacaggtgcagttgattttgccgtaatcattggtaatctacctttagataattatgcttctctgcagctccctgagaaggatacatggggcgttttaatgactaaggatgatcctctagcaaaaaagagtgctattacagctgaagatttagttggacgaaacgtcttaaattcacaacaagccgaaaatcgaaagtactttgattcatggttcggtaattataaagagcaaattaatatcatcggtactgttaacttgaatttcaacggtacacttttagttaaaaataaagcagctattatgctcacactcgataagctagccaatatatcagatgaatccaatctaacttttagaccaattactccaatgttaaaacagccggtaacagtaatttggaagcgagaaaccaataaatcacctgtagctgatttattcctaaatcgtttacgagcatcaattgatgacgattaacaaaaataacctagatcgaattgatctaggttattttttactttatttctttttacgactaaaacgttgcttcaatcgttgccataagcttaatgccctgcgcatatgatcagctggtacatattttcttattgctcgcaatacctttttggaatcacgtgccgcaaaaacaaatttaccatttgacttagttctgatttcaaaacgcggaatataacgtccaccaaagcggacatctgcaaccacataagttacttcattccaaggaatctgaacataatcttcaacgtttcgttcgttataaaattcaaaagctctatcgccgatcatgattttgccgtatgatgcaattcctctaaaccaggttgcatcaacagtgagatcgacttttgtattaattgacttagccatttattaaagaatgccccatacgtggaagagaacaccgacaacgaagataccgatgataatccagattggtgaaactttcttcttcaataaccacatacagaagaaagttaagagcaaaccagctaaaccaggaattaattggttcaagttgtcttgtaaagtagtaactttagtactgcttaaagctttaccgttacccatatcccattgttgaagagcggattggatacctttagcacctgatggaagcttgtcccattcgatgtaaccacccttttgaataggagtttgagaaacaattggagtgaacttgatgtttacccaacgttcaattaaggcacccaagacgaacatacccatcattgaagcaccacgggtaaccttttgaagcataccacctgacatatcactggtgatagctgaaccagccttgtaaccaaattcttgtgtgtaccataagaatgcgattctgataatattccagataacgaagaacaagataggacccattacgttacctgcaatggccattgatgcacctaatgcaccaacaattggacgaacagtgtaccagaatacagggtcaccaacaccggccaaaggtcccatcataccaaccttaacaccttggatagcgtcatcagtaacttctgcaccgttagccttatcttcttccaaagccaaggtaacaccaagaacaggtgatgctaagtatgggtgagtgttaaaaaatactaagtgtctttgtaaggcagcagataaatctttcttgtttgggtataactttctcaatgctggaatcattgaataagcgtaaccaccgttttgcattctttcatagttccatgaaccctgaaggaattgtgagtgccacataacgttaaaacggtcgcgcttggttaatttagttttcttatcagccattatataaatcctcctctatgcgttcattttaatagtcatcaatgatatcgccgagtggatcgccagtgccggcatcgccagaattattgtttccaccgttgccacccttagcttcaagagctaagtacatcaaagccattgaaaggccaatagcaccaagggcgatcaaagttaagtctttgatagcagcaagggcaaaaccaattgcgaagaatggccatacttccttacttgccatcatgttaataaccatagcgtaacctacggctacaaccatcgcaccaccgatagtcataccttcgtttaaccattgtggcatcattgcaagccaacttctaacagtacctgaagggattgctaaaagaagtgcagctgggatagcaattctcaaaccttgtaaacatacggcaatccattgccataagttgatcatacgccagttacccttcttagcttctgcgtccatgatgtgaacgatagcagttgaaatagtacgtacgatcatagttaagaacaaaccagcaacagctaatgggatagcgataccagtagcagtaccaatacccttaataccttgaccaccttcgatcaagataatagctgaagctactgatgctaaggcagcatctggtgcaacagcggcaccaatgttagcccaacctaaagcgatcatttgtaatgaaccacctaaggcaacacctaaatccaagtgaccggttactaaaccgatcaaagtacaagcaactaatggttggtggaattgccattcatccaagataccttccataccggcaagaaaggcaacaaacacaaccaaaatcatttgaatagcgttcatttatttactcctaattatttattactttttttcgtcaagtaaagtttgagccttcttcaagatagcatccatattacctggagcatctgaaggaacttttcttacatcaaacttaacgcccatcttttcaagttcacggaatgtatcaacgtctttttgattcattgataatacgttgttggcgttaacatcgccttccttatatgacattgaaccaacgttgatattcttaagatcaataccgcctttgatagccctcaatacatcttctggattttcaaacaaaagaagtgcatgagtgtttccaaatcttggatctttagcaatttcttgcatcttcttgagtggaacagtatgagccttaacacctgctggtgcagcttcacgaatcatactcttacgtaaatcatccttagctacactatctgaaacaacaattactctatcaggcttcatagctggaatccaaccagttgccacttgaccgtgaagcaaacgtgaatcaattcttgccaaaacgtacttgatatgaccatcaccaataacagtaccttctggaatgctcttcttactgcccttagcagcagctttgtcagctactggagctgcagcagccgtcttaggcattaagtcagctggcttagtcttaattccatctctaccaggttgaacaactgcagtggcgatgtgctttgcagttgcattagcatccatcattctctcagtcaatgcttgtacaaccattggtaaattcataccagcaacaattgcccatttatcatgcttttcagcaagtccatttgcttggttaaatggagtaccaccccataagtcaaccaagaacaaaacttcatcttggttatcaaatgaagcaattgctttttccattttgccacgaatgtcatctggaccttcatcaggctttaagataacatgtgcaaaattatcttgttcaccgaaaagcatttgtgcagattgtgcaataccatcggcaaagccaccatggctggctaaaacaattcctaccatgtaatttcctcctctagatcaaaaaatgaatccgcttttattatacgataaatatagactttaaaaaagtgttttttgaaaataatttcataaagtgccaatttgtttcaagcagtccaaatgccttgtctcccaagcaaagacagaaattagtctaataaaaaaagaaagcctgttttcatgatttgagtcgtttttcacaaatttggcttcctattaaaatatatgctggttggataatttcattttcataaaataacaaaaaaggaagccttccgcttccttctcccctttactccggctgtcagactcgaactgacgacatcttgattaacagtcaagcgctctaccaactgagctaagccggaatattaaaaaagagcacggcagcttcctttcctcgcaggcagttgcccaccaactactttcggcgttaagaagcttaacttctgtgttcggcatgggaacaggtgtatccttcttgctttcgccaccgtactcttttgagcttttacactcaaaactaaacataatccttctcgcaaaaaaccttccagtttgcttcgctttggtcaagtcctcgactgattagtactggtccgctccatccttcacaggacttccactcccagcctatctacctcatcgtctctgaggtgtcttactgcttacgcaaaggaaatctcatcttgaggggggcttcgcacttagatgctttcagcgcttatcccttccgcacatagctacccagcgatgctcctggcggaacaactggtacaccagcggtgcgtccatcccggtcctctcgtactaaggacagctcctctcaaatttcctacgcccacgacggatagggaccgaactgtctcacgacgttctgaacccagctcgcgtgccgctttaatgggcgaacagcccaacccttgggaccgacttcagccccaggatgcgacgagccgacatcgaggtgccaaacctccccgtcgatgtgaactcttgggggagataagcctgttatccccagggtagcttttatccgttgagtgatggcccttccatacggtaccaccagatcactaagtcctagtttcctacctgctcgagttgtctctctcgcagtcaagctcccttatacctttacactctgcgaatgatttccaaccattctgagggaacctttgagcgcctccgttacactttaggaggcgaccgccccagtcaaactgcccacctgacactgtccctggcctggcttacaggtcgaggttagagcatccttcaaacaagggtagtatcccaacattgcctccaataagactagcgtcctatcttctctggctcctacctatcctgtacatgtttaaaagatactcaatatcaagctacagtgaagctccatggggtctttccgtcctgtcgcgggtaacccgcatcttcacgggtattataatttcaccgagtctctcgttgagacagtgcccaaatcattacacctttcgtgcaggtcggaacttacccgacaaggaatttcgctaccttaggaccgttatagttacggccgccgtttactggggcttcaattcaaaccttcgcttacgctaagctctcctcttaaccttccagcaccgggcaggtgtcagcctctatacgtcatcttacgattttgcagagacctgtgtttttgataaacagttgtttgggcctattcactgcggctaaccaatctcttggctagcaccccttcttccgaagttacggggtcattttgccgagttccttaacgagagttctctcgctcaccttagtgttctccactcgactacctgtgtcggtttgcggtacgggtatgtcatctctggctagaagcttttcttggcagtgtgattaccacaccttcgctacttttaattcactcctcttcacaactcgtgttgctggttagaagcatttgactcttaaccgcacttgttgcttgaacatcgttccatcgcgatgcgtgcttcacctcctgcgtccctccttcgctcttaacgatttgacacagtacaggaatctctacctgttatccatcgactacgcctctcggccttgccttaggtcccgacttaccctgggcggacgagcctgccccaggaaaccttagtctttcggcggataggattctcacctatctttcgctactcataccggcattctcacttctaagcgctccattgatcctctcgattcaacttctccgctcttagaacgctctcctaccacgtgctctttaaaacacatccacagtttcggtactatgcttagccccggtaaattttcggcgcagcgccactcgactagtgagctattacgcactctttgaatgatggctgcttctgagccaacgtcctagttgtctacgcaactccacatccttttccacttagcatagatttggggaccttaactggtgatctgggctgtttccctttcgactacggatcttatcactcgcagtctgactcccgtgtatggatatctggaattcgtagtttatctggattcagtaacccctgacgggcccctagtccaaacagagctctacctccattatcctctccacgaggctagccctaaagctatttcggagagaaccagctatctccaagttcgtttggaatttcaccgctacccacaactcatccccgcaatttttaacttacgtgggttcggccctccagtgcgttttaccacaccttcagcctggtcatgggtaggtcacttggtttcgggtctacgtcacctaacttttcgccctattaagactcgctttcgctccggctccgtcttttctgacttaacctcgctagataacgtaactcgccggttcattctacaaaaggcacgccattgcactttaatgtgctttgactacttgtagacacacggtttcaggttctttttcactccccttccggggttcttttcacctttccctcacggtactggttcactatcggtcactaactagtatttagccttgcgagatggtcctcgcggtttcaaccgggattcctcgtgtcccggcctactcaggattctgctaggcgtgcttgagatttcgcttacggggctctcaccctctctggcttaccttcccagataattcaactatctcttacactgccacgtcgcagtcctacaaccccaaatgataaatcacttggtttgggctctttcctcttcgctcgccgctactaaggaaatcgatctttctttctcttcctgcagctacttagatgtttcagttcactgcgtcttcctttgattagctatctattcactaatcaataatgcatctctgcattgggttcccccattcggatatctccggatcactgcgtacttaccgctccccgaagcttttcgtagttcgtcacgtccttcttcggctgttagtgcctaggcattcaccgtgcgcccttttctacttgaccttactcaagaattctcttctcggtcgctctacaatctgttctctttgattgtctcggttttttgcttggattatattcagttttcaatgtactagctctttttgaggtactaccctcaaaactaaacaaagtttctcagtgtgcttccgcttgctctggatacttctcttagcattcctgctctccatatccttcgcttccttagaaaggaggtgatccagccgcaggttctcctacggctaccttgttacgacttcaccccagtcatctgccctgccttagacggctccttcccgaaggttaggccaccggctttgggcattgcagactcccatggtgtgacgggcggtgtgtacaaggcccgggaacgtattcaccgcggcgtgctgatccgcgattactagcgattccagcttcgtgcagtcgagttgcagactgcagtccgaactgagaacagctttcagagattcgcttgccttcgcaggctcgcttctcgttgtactgcccattgtagcacgtgtgtagcccaggtcataaggggcatgatgacttgacgtcatccccaccttcctccggtttgtcaccggcagtctcattagagtgcccaacttaatgctggcaactaataacaagggttgcgctcgttgcgggacttaacccaacatctcacgacacgagctgacgacagccatgcaccacctgtcttagcgtccccgaagggaactttgtatctctacaaatggcactagatgtcaagacctggtaaggttcttcgcgttgcttcgaattaaaccacatgctccaccgcttgtgcgggcccccgtcaattcctttgagtttcaaccttgcggtcgtactccccaggcggagtgcttaatgcgttagctgcagcactgagaggcggaaacctcccaacacttagcactcatcgtttacggcatggactaccagggtatctaatcctgttcgctacccatgctttcgagcctcagcgtcagttgcagaccagagagccgccttcgccactggtgttcttccatatatctacgcattccaccgctacacatggagttccactctcctcttctgcactcaagaaaaacagtttccgatgcagttcctcggttaagccgagggctttcacatcagacttattcttccgcctgcgctcgctttacgcccaataaatccggacaacgcttgccacctacgtattaccgcggctgctggcacgtagttagccgtgactttctggttgattaccgtcaaataaaggccagttactacctctatccttcttcaccaacaacagagctttacgatccgaaaaccttcttcactcacgcggcgttgctccatcagacttgcgtccattgtggaagattccctactgctgcctcccgtaggagtttgggccgtgtctcagtcccaatgtggccgatcagtctctcaactcggctatgcatcatcgccttggtaagcctttaccttaccaactagctaatgcaccgcggggccatcccatagcgacagcttacgccgccttttaaaagctgatcatgcgatctgctttcttatccggtattagcacctgtttccaagtggtatcccagactatggggcaggttccccacgtgttactcacccatccgccgctcgctttcctaacgtcattaccgaagtaaatctgttagttccgctcgctcgacttgcatgtattaggcacgccgccagcgttcgtcctgagccaggatcaaactctcattttaaaaagtttgaatgattgctcattccttatttaagatctttgtctcaaatttattgctcgcgaattgacttcgcttcttgtttgggtttttacacccgcacacttttagcgaaactttgttcagttttcaaagtactacctctgtcttgcttttttgcaaagcagacagctttcatattttatcaaaccatcatttctttgtcaagaacttttttgatttgttttttcgtcttactcaagctttttctgctttcacctgacgacatttaaatatattaccagcttatttacttctttgcaagtactttttttctttttatttgttttctttccttgcatgtctgtttttaagctctcgtcgcatctctcgaagcgactttattaatttaccttattttctccgctttggcaagtcttgctcttcgttcgcaatcttttagaaacgcttggacgcgctgtaattatttctttatttctatttcaatctacctttttctttttgcttactttatttttatccttacgcttattattcgagttttactgttttttctcttaattttagtacaaaatttttcgaaattttttcaaaataattcaaaaaacagtgttttgcctaatttttcactcaaaaatgcaaaaaaagacgtttatcaaattgatatagtcctactttagtagacagtacaaatatataaaattgtactatctatgaaagcaggactttttgtatgtctagaaaaagtaaatttagctatgaagctaagcttaaagcagttaaacaatacataagtggcgaagcatcacctgcttcaattgcgaaagttttaggggctggcaagactacactgcgccaatgggtatatgcatttaaagatcatgggccagaagcattaagaccacataaatataatcaaagatacagtaaagattttaaactcaaatgcatagctgcctatttaaatggcgaaggctcatatgattatctaacaaataagtttggtttgcgaagtgctgcacagttaaagcagtgggttatcaagtataatagtcatcaagaactcaaggactacaatcctattctggaggcttatatgactaagagaaaaaagacaaccctagaagaacgtaaacagatagtgaaatactgcaaggatcatcaatggaactacaaggaagcagctcttaaatttggctgcagctatgcccaagtatacaactggtcaaaaaaatacagcgcaaagggaactgacggcttagcagataggcgcggtcatcgtttaaaagaagctgagctatctgaaactcaaaggctaaagcgtgaaattgaacagcttaaaaaagaaaatgatattaaagaccaagagatagccttcctaaaaaaagtgaaggaattagaaaggatgtgtttgctggacagccaaaacaaagacaaatagcacttaaacaacagcagcgaaattctctttacagtttgatcaaagaatgtcaccgagaatataagtggtcaattgaatggatgtgcaaacaagccaatattgcccggtcagcctactacaaatggcttaatcataagccaagcaaacgtgaactaagagatcaaaagattcttaagcgtattaaagaaatagctgagagcaataacagcctctttggttctcctaagatgactttggctttaaacaatgagctagcagacggtgaggccaaaatataccgtagaactgtggctcgcttgatgtgcgtgaatggcatctatactagcaaggccagatttaataagaggtatcgctatcaagctgctagaccggaagaaactgccgaaaatctattgcatagagacttcaatgccactaaacccaatgaaaaatggtgcactgacattactgaagaaaaaattcctggaacaagtcaaaagatttatctctgtactatctttgatctatatgatcgtttccctgttggctatgctttaagcaagcgcaatgatacagccctagttaacgctgctctgtcaactgcttggaaaagagagcccaatagtcatgcaatgcttcatagtgatcgaggatttcaatttaccaggatgccttttaagcatgagctagaagaacatggcatgccacaatcaatgtctagaattggccgctgtattgataatggcccaatggaaggctggcaaggtttaattaaagaaatgcgagaagttctttatccgaaggcaaatagctatgaagagatggaaaaagcctttaaagcaagtattgaatactatacgcgtggtgctagttaaatcgttctagacaatatgtcatattataagctaaaatagctatttctagccgttgttgaaaacctactaagctcctggctcgattattctcagcattgtaatagctaagcaaagaaaagtcgctttcgattgttcttctaattgccattaactgatgatcattatgctttttagcacccctcatgtttttacgatatggtgtccaaagcacgtatcccatacgctttagcttggctgctaagtcttttcctaaatagccttcatctcctaaaagataatggttaattggatgagcattgatcatcaattctaccgtctcttttgcatcatgtaccgacgccttagtaactgcgtagtcaagcagatagccatcatcactcactattgcgtggactttgaagccataatagtagatttttttcgtcgctttataaccaatatcggctatgccacggaagatcttaacgtgataattgcgaacaggctgacaaactggaatcggaaaactgtcgataatcaataattctccacctacctttacttcctgattccaaccctgacggatacaacgaattagaggcaagagcattcgagctcgacggttaaaacgagaatgagataagccaacgaagaatttacagaatcttcgttgagattcaattccaatttcagtttgccaaatgagcatcgctaagatagaactatcaggaagcttggtctgatcaacatttttacgatgtttaagtccatcaggcgcataaagcttatacagcgagcgacaaatcacatttaaccgattaaaactaacttgtaaatggtgagaaaaacgattaagcttgagatagttcaattagatcagactcttttctatttaaattacttacaacttgagtctagtctaattggacttttttattaactaaaacgatttaactagcaccacgcgtaatactatattaattatgatcctcaggagcgcttcaatggcaagagcgcaggtcaggttagaaaagaagctaagaataatccagagaatataatttcatatccaataaaacaagataaaagatataaagacttttggaaaaagattgatgaaaagaaaaatcagctcgcacaatagcgaactgattaatcaaattaatttatatatttaagctgtctacttgacacggtacggatcaaatataatcattcgataaacgtctcattttatatctttagatgatcaatctttagtgtctattcatcttttttcttacgtttttcaacgccaagtaaactaatccaacctaaaccagcgagtaatgtaccaatcaaacctagtgtgtgtttgtgttcactaccagtttgaggcaataaatcttgcacggacttcggttttgcatttaatttgttagctaattgctttctttctgttttccctattgtcctcttgccagattcaatgtctgctgccttaactgggccgttagcgcgtttctttcgacctgtaggcataccttcatgcttaggattgttattagagtcatagcccttcttatttgctttagaatgattatgcttcttttcactttccttatttggctttgccggtttatctggcttcggctctggatttggttttggcttcggttgaggttctggttccggagtaggtacttcatcttgcttgtaagtaattttaatattactgtcagccgtatctactgaaaccttttccgctgccaccttactttgtgaagcagtgtagccactaaatgttggagcagtatatgcatcccactgagtattaccatctaccctccactcactgtatgtaactttgccagtaactttatcaaacgttactttttgcgtggtaatcagcttaccacctgaaggcgtaatgactgtaattattctagttggagtcttagtaaaagtatccaagtgatcatagttcttacttggatcaccttgcactgggcctgttggaacatcccttggtggagtttctggagtaacgataatggtgtcgtgttcaacccttacagttacagttggaatgccatcagcagttgcaactactgtcttagaaatatcctgtcctgaaacaatcttccatcctgctagagcttgtggatttacatctactgtttcactggtcttgccactaagcggagtttgccctacttctttgccatcactatcaacgtaagaaatcttccccgtttgagtgttgacagtataagtagcagtaacttcactattggcaaccagctttccagtaaccaagtcatatacggcagtccgcgtaaattcaacggtctgtttcttttgatcttctgaaatctgagctagttggcaattcttgatctggtgctaactcgtagttctctggaagcttcaaatcaaggttatcaacagttgagccagcaacgccagacttagtaattgtctgaccaacttgcttgttaccttcttgagtatcttcaaattcaatagttaaagttgcatccaaagtaaacttagcctttgaagaaatattcagcttgtagtttggatttgctttttcaagggcagtaatactttctggagttaagttaattacataaacgccagattcagctggaattccatttgcaaattcataagtcaaacctgccggaactgtaatagcagttggaacattaactttaaagtttgttccatcaattactggtacagtgctttcttgactaccagaaatcgttacattttcttcagctggactaattacataagtgaattgaccactttcagaaactgcatagttaggattatcatcttgcaatttcttcaatcccttagcagttaaggcaatgtagtaagtaccggcatttgttggcgcagaaattggcttaccattggcatcgacccattcataatcaccagctgctaggttagcagtattcaacatttcaccgcttactaaaccagttggagtgaatacaccgaagttggtagcttgagtgttaatcgttgcaggttgaccatcgtacgtcttgccatctgcgcccttactattaccgtcaagaactacattaagatccttttgtttaattgtgtaagtggcagagcctagcaggtcttcagcatccaaggtgacatttccttgaccagcgtattggttaagggctttttgcaagttaacaataccattggcactcagcttaatcgtgtaagtaccatcattaactggtgcgctgccagcattccaaatataatcaccgtcttgcagagcatacgtactttcggtagttgaacctgggaaagtaaagtgaactaaaatttgaccattgctgttaacttgtgcagttgttacagctgtaccatcaaatgtcttttggttagagccattaagttttgcgtcagcagtggctgcagtaactatgtagttagctgttgtcttaaatgtccacttgtagttagcaccattattaccagttagttgcttaagcttttcttgaccagcctgtgacaatttaacttggtaagtaccgacattcgttgcattaccaacaatttgcaaatcgtcagcagttaacttaagtgtctgagcttcaccatcagcggagtaaaccgtcgcatcgtaggttacgttgtacttattcaagttaagtccacttggtaaggtttgcttagcatcataagtcttgctgtcaccactattcagggtaacagtagcttcgccctggttaatgtacccttagtagttacatcagctgctacttgtgggtatgcgtagttagtacccaaagctttttcaatgttagccaacccttgcgcagataattccacgtggtattcaccgacattgcctggggtttgatcaaagatcaagtcaccatctttagcagtgtagcttaaattagtactattagtactatttttaccatacgtatatttacaacaacataatctttgcctggatcaggaacattaacttgccaagtttgtccagcttctttaggtagactccatgaaccagaaatcactttaaatcctggcgttgttgaatcacctgctgtttgatcccattgccaattaccataagtaatcgtgttattagcaacatttaaactaccagtctgggcatagaatacctgtatttgtgaatcaggtgcaaattgttgaccatttttgtcaccaccagcaattacatatttagccgttactgttctcgcttgctgttttactggaatatacaaaacagtgtgaactggacgggcttcataaactgaggcgttctcagtatatgctagagactccttaccctcactagatgtatcttccttattccaagttgggtaaacaaattggtttgctgacctggatcgccgctcttattgtaagcactataagaaacttccttattattttgagtagaaacatctttagtatcttctagactagtagcttttttatcttctgcctgtttagttgaattctgctcggttgaatttttgctagtcaaaggatcggtaccgctaacttctttttgagcagtagtatcgttatcattcttaccagctgtcgtagtctgatcatttccagtatctgtggtagtcttcttagccgactcaacctcttctgtttctactggatccgtagtatccgcatgaaccgtttgacttgtattcatcgtccaaagcaaagttgaaagcaaaacggaacaaactccaatgttcaattttctaatactaaagcgctgcttgccttcaaagtcatttttatttagtctttctattacgcggttttattctattcatctattttaacgcctaacataaatcacaacaaaaagcaggcttaaattatatgcaaaaaaatcgttattttaagttgtcagtcacaacaactaaaataacgattttgcttttttaatctttaattacttaaattaaacctgattccttagtaatcttcttcataccattcatgtaaggaacaagtacatcaggaacagttactgaaccatcttcgttttggtaattttccaaaatagcagctacacaacgaccaacagccaaacctgagccatttaaagtgtgtgccaagtgaagcttgccgtcttcatcacggtaacgaatttgtgcacggcgagcttggaagtcagtacagtttgaacaacttgagatttcacggtacttgtcttgtgcaggcatccaaacttcaaggtcgtaagtcttagcactagtaaaacttgcatccccagttgaaagagcaactacgtgatatggcaagcccaacttttgcaataagtgttccgcattatgagttaacttctcgagttcatcccatgattcgtcaggcttacataccttaaccatctcaaccttacggaattcgtgcattctgatcaaaccacgagtgtcccgtcctgctgaacctgcttcacttctgaatgctggtgacaatgcagtaacattgattggcaacttgttttcatgaataatttcatttctgaagtagtttaccaatggaacttcagcagttgggatcaaagttaagtcacgtggcttatctggatcgtcattatcaacgatggtataaacatcttcgtggaacttagggaattgaccagttccttgcattgatgcatcgtttaccaagtatggtgggataatttcggtataaccttccttagtgttttcatcaaggaagaagttgaagacagcacgttccaaaagcgcaccagcaccgatgtagtaaacaaaacgtgcacctgaaacctttgaagcacggtcccagtctaagatgccaaggtcagtaccaatatcccagtgagcctttggcttaaagttaaattcagtagttgggtgccacttacgaacttcttcgttgtagctatcgtccggaccaattgggtctgaatcagctgggaagttaggcaatctaagcaagatgtagttttgcttttcagttaattccgcaacttccttatctaagtctttgatttccttacctacttcacgcatagcagcaattgcatcgctagcatcttctttgttacgctttttttctgcaatttgcttagaaacgtcgttacgcttagcctttaattgttcactcttagtcaaatccttacgacgcttagtgtcgatttcaactaattcatccaattcttctggcttaatgccacgcgtagccaatttcttctttgaccagtcaagattctcacgaatcaccttaatatcaagcatataaaacctccatgatatgcataaaaaaagagccgacttatccctacacttgggacgaatcggctcttacacggtttcgcggtaccacccagcttcagtctatctagactgcacctctttaccagacgagtaacgacgtcaaaccgtgcaactattaattgcccacattattgaaatctggaagcgactatgcattcactcgcaccaaccgtgaactctctgaagcagtcttaggatttcgtgtttgcatttattttaagccattcttcttttttgagcaaataatatttttctttaaacgaaaaaagtgcactaacttgtgtgtaatcgacagtataaacatactgaaatcctagtgttttaagcaatttctgtgatttttcattatcggcaaaagttccagcccagacttctacttgctttttctttttaaaagcataggtcaaaatcaatcgtaaagcttcagtcatatagccgtgaccttcaaacgactgatctagcaaaaagccaacttctttagtctttaataggccactcttttcatctaagccgcgttcatacaattcaaccagaccgatcacttcattgttcttgcgcaagcaaacgacataactttcaggacgcgacatatattgcttcacgccattaaccgcctcagtcagattgcggtattcctcaaagccagccatcttgtggtagcggggattgccaccccacttcagtaattgctgcgcgtccctttcttcaaaaggtctcaaatatattctcttagattcaagcattagttacccatcagcttcaagagccactttgcaccaaactgtaggcctatactataggccgcaattgtccatggcttacacaaaataataatccaaaaataagtccaaaacttcattttagtcaatcctgctagcaggcaaagcacgtcatcgggagctgctggggcgagaatacataatgcaaagaaccaattaaatttattctgattctctgtccacttcatatatttatcaagcgtttcttccgaaacaatatgcaaaataaagggccggccgtagtgtctagctaaaaagaagttgataattgagccaatacaaatccccacgtagttataaataaacccagcaactgggccaaagaagaccacgcctcctaataaagacacgcccccaggaataatcggaataactacctgaacaatttgaatcaacacgaaaataatcggaccaacaatttgtttattagccagataagcccgcattttagcttgatcggtaaagatccccaagcggtaccaataaatcaccagcaacacgattgcgactccacaaactatagttgcaatattgattaatttacgactagccttagtcgatagatgcattttctcgccttccttcatcgcctagtagttcaattttaacaaaaatccagcccagataccgtaaacatgcaaatctaaaaaaagttttattattttagctactttgggcagatactatataataaagttaataagttattagaaaggtaggcatcttatggttgtaattaagaatgatattgtttatgacaagactaaagaattaaaaacggatatttactatcctaatgatacatcttctaataccaagattttaatcttctggcatggcggtggctggtttagaggtgataaagacagcgtcaaaaatctaggtattcgctttgctaatgcgggctttatgaccttcatccccgactactccttagcacctaaataccactttcctgctgctcatgaagatgcattgcactttgtcgactggctgttgaattctgaatacactgatcaagacgatatcaaaaacattgttcaaattggagccagcgttggcggtgaaatggcaattgaggttgctgggaaatacggtttccctactgtcacctggtctgctccagttgaatattcaaactggattaaagatcatcaagatactaaagcatccccagatgccgctaacgattttggcattaccgatcctgaaaagatcagacaatctttctacaagcacttcacattaacctacacaggtactgaagatgaggctgtattacaaaaattagacgctaagtcatttgactatagccatctcaagcaattaatgatgattaattccgcagatgagttgacaccactagctacagtattggattttgttaagttcttagctgacaaaaacttaggcgtacagctcctcgtaattcctggtcacggtcacgccatggcctatggtcccgattatgtagacgaatcgctcgattttttatatcaaactattaagagacaaaattaagtatgattaacatccaaaaattcgttcaagtcagaaaaaaactaaagttatcacaaactgagctttgccaaggcatttgtacccagtcgaccttaagtaagtttgaaaataatgggcaagtgccttcatttaaaattctcaagcagctttgtgaacggatggatattgatgttagcgatattatggacagcagtgagcacaaatatatcgcgcatatcctgtttgaagcggattttgcttttatcaattttgattacagtaaaatttttactttactttcacaaatcaaccccgaagtagacctaaaacgccaaacaaatcggattcattatcactatttgcgcggacaatatgctctaagaagtgatcgcaatcaaatgagtgcgctcttttatttcaacaatatcttgaccacccaggaattgcctgaaaatgatatttaccgcttgttggcattaaatggttgtagtcaaatctatgctaaacaaggtgaaacagagaaagccgagcactattatagtcaagtattaaagaacattatggacgtcaagatcgataatattttgactacaatgcatgccttaagtattttatgtgatgccggtgaattctatggcgaacgaaaaatgtatcgtgagtctaatgcattattgcgctatgcctataagattggcgctgagaagcacgtgattttttacatggcacgcatcctattgcggcaaggcatgaatgatattgatcagtcaaaaaagaaagcaattgctatccaacatttgcacgatgcctgtgcttttgcccgaatcaaccgcaacacgattacgctaaatcaggctaaaaaattactaaaaaaattaaatgactaagatccaatttgaaatatagtaataagagtttgttcatttgattttgcaaaaatgataaaattagtataaatgaacgctgtttaggagtttcagataggttgactttggaacgaattatcaagtttatgtttgacagtattggtagctatttatccattcgaaaaattgccaatacgttaacttcaatgggacataaaatcacaccaaatacggtagaacggtatattaatgcgttactcgacagtttgattatctatgacgtttcacgattcgatattcatggaaaagagcagctaggttcgctaaaaaaaatattacattacgcgtggtgctagttaaatcgttctagacaataagccaaattataagctaaaattgcaatttccaaccggctttgaaagcctatcagactacgtgctcgattgttctcggcattgtaataggtcagaagcgaaaagtcgctttcaattgttctgcgaatagccatcaattgatgatcattgtgctttttagctcctgtcatatttttacgatatggtgtccaaagttcgtaacccatttgttttagctgttgatgcagttctttgcctaaatagccttcgtcgccaagaagatagtaattagatggatgggtattttctatcagttcaactgtctccctggcatcatgaactgatgcctttgttacgacataatcaagaatgtaaccgtcatcgctaacaatggcatgaactttgaaaccatagaagtaaattttcttggtggccttataaccaatgttggcataaccgcgaaaaattttagcacgatagttgcgaattggttggcaaacaggtaccggaaagctgtcaatgatcaagaaatgtccattcaggtcaacctttttattcatttcttgccgtatctgataaatcaattgcaatagctgacgtgaacgccgattaaaacgtgagtgtgataaacaattgaaacattcacagaatcttctttgtgattcaattcctgtcttagcttgccagataagtaaagccaaaatcagactgtccgtagttttaatttgatcaatatttcgccgatgagtaaactcagccggtgcatacaaacgataccagtgccgacaaattatcactaaatctttaaaactaacttgtaaatggtggctaaaacgcttaagcttaaggcagttcaatcagatcagactcttttctattattactatttacaagtcgagtctaacaagattggacttttttattaactaaaacgatttaactagcaccacgcgtattacattgttgatactgggcttagatatcatttgttggcaaatcaaaaaaagatcgtggacatataattgaaaatattgtttatcttgagttgcttcgtcgtggatataacgttactgtaggtagcatccctaatggtgaaattgattttgtcgcaagaaagaataacgaaattttttattatcaagtgtccgaaacagtgctagatgaaaagaccttagagcgcgaattgaaaccgtttaacaagattaatgatcattatccaaaatttctattaacaatgaatgaatttggcaaaaatgataattttaacggaataaagcaacttaatattttagattggttattagaataattaagctaagattaagaataataatttaaaaaaagaattcgaaaaatccccatttgtagtgaaaatgcctacaaaatggggatttttttagataatcttgtaaccagtaactggcttagcaggtactgtattgaaatcaaagctagcaagtttgtccagttcagtattaccatcaataattgtagtaacaccttgagcaatcatcaggttcattactttatccttgtctagatccttagtgaaggttaccaagactacaggcttatgcaaagcacgcatgaaaccaatttcaaaagcactaccatcatctacattgtccatgtcatacaagaagacgccacatgtagagttaactagaccttccaggtcattgttataagtggcaaggcgccaagtcatgctgcgaatgccaccaatttcaggattcttttcatccggatcaacaaaattttgatcaaatggaaaatgcactctgaccactgtcggattttcttctaacaaggcacgagccttatcaactcgagcacgttgatcatcattgtaaaatggagtgcctaaataaaccttagcagttgaaacttgtttgttcatgcttttgtcccttcaatgtttaaaacttacaaaataaaattatttttcattttagcatgacttttttacaactaaaagcacaaatagctgtgttttcattgtaaacgctttataatagaaacataacttattaaagctaaacataaaacttattggaggaattattttgtctagatatcaatcaattaatccatatactaacgaagaatttgcaagctatgacaattctactgccgcacaaattgacgatgccattaacttagcacacgctttatataaaaaatggcgtcatgaaaatcctgagacccgcagtcgtcaattacacaagatagcagatgctttgcgcgagcatgaagatgacttagccaaaatgatgaccctggaaatgggaaagcttttgcgcgaatcaagagaagaagttgaattatgtgcttcaatttgtgattactatgccaaaaacggggtcaaaatgttggctcctactccaatcgaatcagacttaggcaatgcctattatttgaagcaatcaactggcgttattatggcttgtgaaccatggaatttcccactttatcaagttattcgggtcttcgctcctaactttatcgtgggcaacccaatcttactgaaacacgcccacaatgttccaggttctgctgctttaaccgctaaaatcatcagacgtgctggtgctcctgaaggcagcttaattaacctttatccaacctatgatcaattaagcgatattattgccgatcctagagttcaaggcgttgcattaactggttcagaacgtggcggttcagctgttgccgaagctgctggtaaaaatttaaagaaatcaaccatggagcttggcggcaatgacgcatttatcgttttagatgatgcagatccgcaagtattgcgtaacgttttaggcgatgctagaacttataacgatggccaggtatgtacttcatccaagagaattattgttgaaaaatctcattatgaggaagtgctacatacgcttaaaaacgtcttttctaatcttcaagcgggtgacccacttgaagccggtactaccttgccaccaatgaattccgaacgtgccaaggaaaaattagaagctcaggttaaaaaggccgttgacgcaggagccgagattttttaccaatatccagagattgattctaaaggtgccttcttcagacctgtaattttgactaacatcgacaaagaaaatcctatttatgatgaagaattatttggccctgtagcagaagtctttgtagttgacgatgatgacgatgccattcagcttgcaaatgattctagctatggcttaggttcatctgttatctctaacgatatcaaacgtgctcaaaacgtggccgctcaaattgaaactggtatgactgtcatcaatggccgctggattacctctggtgaattgccatttggtggcgtgaagaagtctggctacggtcgtgaattaagtgacttaggcatgatggcctttgttaacgaacacttagtaattgatgttactaagaataatcaatagtaatttttcgataaaagaaacatactaacctagtgttggatcatgaatcgacggattcacgatctggcactttttattttgtctaaaatagaaagtgaagataaagcaaatcaagtcttcagctttttagacacttgatgtcgtaaaagaaacggactgctttaccacctattcttaagtctcttcgaagtctgtgggcacttagatgccgtgtttagaaaattagaattaataggttgataaagaggtttatcttcacagcggaggttatattatggaatcacaaattattttcggtattgatgttagcagtaaatcttccacagtttgtgtggttaatgaccggatcaaacaaggcgaatcttttagaatctctaatgattcctttggctatcaaaaactttatgagcaactgaaccaatatttgataactcctttagttgttttcgaagctactggtgtttattctctaagcctgcaagctttcttagaggattatcatattaagtatttgaagcttaatccgcttaaagcgaaaaagctaatggacaataatttacgccataataaaactgataaggtagatgcttatcgcctggctttaattcaatttaatgccccgcaaaagttgcgtgatccacagcccagagagtatcatgaacttcagaatgccagtcgctattatgaagaacttactaggagtatagttactactaaaaatcaattgcaccgcaacctccaatccactttcccacaaattgaagaaatactgtctcatccatctggcagaatttattgggcgcttgttagtcttttcccacatgctggatatgttctagaaaagaatgagacacaggtaactcaaatgcttaattctatttctggaataggacaacaaagggcacggtacttaaccacaagattatacgcttttgctagagaagcttatccttatgattccaaagatagtattatcgttagagctattcaaaggaacatttctaatttgttttcactccagcaagaacgcgactatgtaattaactacatggaaaagctggctaaagcagtaaacgctcgtgctttatccatctatttgagtatcccaggggttgctagaattacagcagtgagattagtagcagagctcggtgatctaagacggtttagcacttcagctcaaattgatgcgtttgttggcattgatccaggaaggtaccaatctggtgaaaaagacagttctcttggcattaccaagcatggcaatcatattgccagaaaaatactttatcgagttattattcaaatggagacggtaaaggctacgcagccttgccatataactgattattatgacaagaaaaaacgatcttcaaatagccaaggctataagaaaatcgccattgcatcagtccataaactgatacgcacaatgtttgctcttatcaaacatgatcaattatatgattacaacatagccaccaaaaataaaagactttagctgaaatcaaataatcaacttaagtataagcaacctatggaaaaactacaagtattcataggcttatttgtggtactttcgctttttcttaaatttaaactcttatttgctttaaccttattcgcatcattaaaacaagtaaatttattttcttaaatcattgataatacttgactttgggtagaaaatacgctggcaacttaaccagcgtatttcttttacttattattaattctatttctttttaaaaagattatatccagccaaaatcgtggtcaacacgctagccaaaatcataaagtaagctgaagctccgagagaaactgcatatgacataagttgactcgtcaattgagccagcaccccagttgaagcatgtgccgcgcttgatatttgaaaaatcatataaatcaaaaagattgattcaatcaaagaaaggaagaaggccaaagtctgactagccttagtatttttcaaaatattataaataatgaaaattgggaacaagaatagtagcaaccagacaatgtaaagaataagtgcataccatgatgtcacgccagatgaaagcaagcgccctgctaaaccgaacagtacattggaaatagacattctctgcgtgtaagccgaggcacccgagtcggtaaagagaacgattagactaactaaagccgtaaaaataactgaaatctgcacataattaaagtgatgtttgcgaacattttttatttcacgtacatgattttcaatccgaggatatttttgcacaaattctcggtttttcgctttgactttactttcacgtgcatccacccggttaaagacatcggaaccaattcggtcaatcttttgcgttaatcgcttatcaaccgtatactgctcgatcttatctttacgatcacacacaatataaagccaaaccattagggctaaaaagccagtccaccctgccgctctagaaaaactcattaggattaaaagtaagactcccaataagaagactaaggtcgcatttttcctaacccacgcaatcattctttggacagtggtgttttgcttttcaggaataaattcttcccgataggctgcacggctgataatcttttcgccttcatctggttcttcaaactttgctttttggtgctgatctgtgaaaaagtcgtctcgatatttttttagattgaagccacagtttggacaaatatcatctgtttcactaattttatggccacaatttggacaagtagtcatataaaaattcccttctttttcaatctgttagtcattattataacatgtatcagaatttgaagatcaaaacaaaaaaagaccgaatcattgcgattcggtcgaaaaaattatttactaactatttttcaacattaattggtaaaacattatcaatataaggtgaatgtccatcagcaatcaaatctgatatctttctcaacattggaaattgtatgttcctagtatcatttccaaacttttgatatgcttctggagttgcatctttatgtaataattcatatcctaatcttttgtagaaattaacactttcgtccacagattcaagataaatcagctgaacacctgtatacaatgcaatcaccatgcacatggaaaagaattccatcattagtgctctaccaattcctgttccttggtattccttgtcaattgcaaaataagcaaggtttatatatggtgtatcaactttataagtaccatcatccttcttaacattctgtgttaataaccctactgttgacgagaaaaaaccaactatctgatttttgataggatccattaatacaaaagtctttaatttctgtgtactttcgaacttcggacattccttacgaaaaaaattatctataccacgattagtggaatcaaaatgtagggctaactcttcaaaatgtggacacgtacttaacgggcataatttaaatgctctactttgattcatgcttttccttcccacgttgaattactatcccatcagcttcaacttctttttgcaacttttttatagacacacgtggtactggattggctattttgtttttgaattctttaaatgctttttcatttttaaatgttatctcagcatttctaacaatacctaccataattaccaactccttttagtgtacctattaatattatacaatcataatctgttttactattagtttcaagatttattttaacaaaaaaagaccgaatcattgcgattcggtcgaaaaactatttattaattatttttcttatttcttcttttggcgaacttattaaggtcaattccctcatatgtcaacttagtagctgctgacatagtaattggcaaaatgaagaccaagatgagcaaaccaatatccacggctaaggcaacttcaatcaaagttggaatacctgatggaatcaaggctgcaaaagtaccacccaagataattgcggctgatataacaaccgtaccaatgatagcacatgccttcaagattcttgaacttggagtagtgtatccttcagactcaagttcacgataacgagtcatcaggaagatactgtagtcaacacccaaagcgatcaacataatgaagctgaagaatggtgtgttccaagtaagcattgacttaccaagaactgctttaacaatccattgattgattgaaagtgagcagagataagcaataagtaaagtaccaagaatgtagactggttgcaataatgaacgagttacgaacatcaaggcaatgccgataccgattaacatgatggcagcagttctaaggaagtcgccactggcaactgtcttagtatcttcaatcttggaactttgaccacccatagctaccttagcattcttcaaagcagtaccttggaatgacttcttagccatagcacttaattcttgtgacttcttagtagcttcggttgcacttgggtttgaatcaaagacaacaataatttgagctgacttcttgtctgggctgaggtaaacatccattgacttcttgaacatatcgttcttcaagaattccttagggatgtagaaagtatcagcggcagctgatgaacctaaacctctgaggtaggtttcaccttgacctaaaccactattaacagtgtcaatacctgaagtcaattgtggaactttgcttgccaacttaccagcgccagcactgagttgtccagcacctgtgttaagttgactgatacctgaaataagttgtggagcttgaccagctaattggccgataccactgttaagctgaccggcaccatttgcaagtgtgccaagacctgtgttcaattgacccgcgccattgttaagtcggtttacacccgcaccaagacgactagcgcctgacgaaagtgaacctaagccactgcttaattgaccagcacctgaattaagtctttgtgcgcctgccacaccttgtgaagcagctgattgaacttgcgtcaagcctgagcttaattggttcaaagcagtagctgcacctggaagtgccttgttagaagcttgagctaatttagctacttgagtctggagagttgataattgttgaagtgatgaagttaaagcacctaattgtgagctaagtccagaaacatctatagcagcattacccgtttgagtatcagcttgtgtattactaaatgccttattaatagctgcttcagccttttgctggtcttcagtagttaagccagcactgccaatggcttgaagtgctgctcgttttgcttgtgcctgagcaccagcagctttttgactagctgctgacaattgtgctgcttgttcttgtaacttcttcaaacttgcagttaatcgtccaacttgtgaagtatctaatccactaacagcttgattcaattgttgaataccactgttaatttgtggcaaagcagtttgaagttgagcgagttgttgtttgtttgaaccactcaattgagttgaaagttgtgaactcaattgttgtaattggttaaccatttgttgggtaccactttgcaagctgctagcaccattctttaagcgatttgcaccgctaactaattggcttgcaccactttgaagtgcgtgagtaccacttgccaaacgaccagcacctgtttgtaaacgtactgcaccactttgtaattggcttgcaccattttgcaaacgactagtaccaccaactaattgttgggcaccactttgaagacgacccgtaccatcttgaagttgatctgcaccatccttcaaactattggcaccattagcaaccttgttggcacccttactcaatttgcccaaacctgaacgagcttgatcaacaccgtcgttaaccgtgtttaattgattgttgacataaagcatatcaattggttcgccgtaaggttctgtaacagatgtcgcaaatgaaacatcttttgaagcttgaagttgcttagtcacttgatcaattaacttcaaattttcttcattgtctaatctatgcttgctttgaatgtacaagtatgatggttcagccatccctttagagaagtgcttttgtactatcaacaaaccttgcttagatggaactgaatctgcaatttcatcagtgtcatcgtagttcaagtgacctgagtacattaacatgaatggcacaacaacaactgctaacacaaccaagtaaataattggatgcttcaatatggcagatgaaataccatgccataacttgtcatcactttcaccagtaaatttcttaactggccagaacattttcttaccaagcgtagccataaagaatgggttgagtgttaaaagcactaccaataaaacagcaacgccgaccgcaacaccaacagctgattggtaaacggagaatttagctaaacttaaagcagtaaaaccaattaagatggatgaacctgagtaaagaattgttttaccagcattgcgcaaagcgtcatgcatggccttatacttgtccatcccttttcctagattttctttaaacttgtcatacagcaaaatgttgtagtcggtaccgataccgaagagcacgataaccataaacacttgcgtaaagtttgaaaatgggaaattggcgcttttaactaaattagtaacaattgagaaggaaggaaggaatgaaacaccaactgtcaacaatgaaataagtggaacaattggtgacttaaatacgataaccaaaacaataaagataaagacaactgtaatggcttcagtcttcttaattccctcttgaattgaagcggagaaggcgtgctgcaagacatccgcacccgttacataagtacgaagcccttgcgttttcgcggccttgttcatttcgttataaactttttcaatcgtaccatgactcttagccacattaaattgtgctacccaagtcgtgccatcttttgattgaagtttctttcttgtagcaatattggaatctggaagtaatgaatccttgattccgtacttgcttttatcattagtgaacttatcaagcgtattattaatagcctgtttatcggcatcagttagcttgccactctttttgttaaaaacaagtgctactgcataagtgtttttctttttcgagccccaattgttctctattgactgtgccacattgctttgcacattacttggcaacgtaatgttagagtgatcattagtcagctgcgtaatgttaggcaaagcaacaacggaaataatcaatattaaaatccacgcaatcagttcgaaaacatggttcttcagaaatttctgcactttcctatttcctccctatttgttgtaaatcaggtactggttctacaagccgtaaaatcatttcatgataattacgattagattcatcttctgtttcatctccaaaagacttcgatttatccaaaaaaacgtaccctaatacggcgccaattaaagcatgaaatgaaatgacactttcttttttaaaattaagtctttcacccattttaattaaatccaagatttcttgattgatggccgcatcctttggatattcgttcaaatgatacagaatacttgataaagccggatcgcttaataaaaagtcgcgcacaacatccgcaaacttaagcaatgcatccctacctgacataccgattagatcgttcatcaactcatgacgtaagatcttaatctgtcttgcaccaactagtgatagcaattgtttgcgtcctgaaacgtaatgataaagcgactgtgagcggacatcgagcgccttagccaatgctggcaaagttgtagctgtcagtccttttttagaaattaattcagtagcttgatcaattattttatccagatcaagatttcttttctgtgccattttcatccctcctttgtcttagcatagtaaataatatacacctacagtgtgaagattacaatctacatagtgtaaataatttattttttctataaaaaaataatgaagccttctcggacttcatcatttccgttacttatgcttttttataaaccaagcattaaccgttttgcccaatttattaaaattcttgtgttgcgtgctccaaacagacatacagtaagcacgtccgttagtctgaacaattgcgacagcaaaatcatcatcaccaattgcataaatgccgccacttaagccagaaactaaacttggtcgctctttagctagggttgctaaaactcggctagcatattgccgatttaatacccgaccttgatacaagccaatcattgttttagctaaatcattagctgttgtctggccagtcatatttgagttgaccttagtttgagtggcacccatttttttagcaacttggtcaatattattaactccaatttttctagttaaggcactagctgcagttttgttacctttaagcattgcgctacgcaaataacttacaccataggtaataccaacttgaaacatcttatcacccttggctttgtcttttttgctaatcttaatcgcagttcgcgaccccatcttgcctttttgttcttgctcatacaaggcgatcagtaaaaataaccgcattgtttttcctgcgtcatgagccttattagtattaaaaactacggcaaagtgactagagttagttaaatcctgtgctactacctggaagctatcatcaatgcccataacttttttgatttgcttgactagcttctgattactgcctttttgagctttaacatggttagaatattcaatcgaattaaccttgggctccttaggcttttctaattttttaacctttggctccttggtcttctttttattcttagcgaccttgctgttatttggttcaacaatctttaactgcgcgttttccacccgctttatgtttgatgtatacaaaatgaatgcaaataaagtcacaattaaagaaccaattaatattttatgtttcattaaaacgcctcaattttagaagaaatgatgccttttcatcaaaatgactaaccaaaccattaaaacaaccatcaaaataatgattaaaacccagtcaaatgaattttttaaaattggtagactaacattcatcccataaaaaccggttaaaatagttggaatagttaataccaatgaccacacagttaagaattgcatggtatcattcaaattattgttcatcatattattactggtagctgataaagtcttagttacctgctgggaaatctgcaccatttctgcagactggcttgattcaatcaagacgtcatccaagcgttcactggcttctttagtgaagtctaatttgctgtgattcaggccatgcaacatgattaaatccgtctgaattgaacttgataaataaactaaacttttttcaatattcgaaagttccaccaaatctttattgttaatgtcatcagacaacttctgatctaggctgttacgttcaacgtcaagttgcgttacagcacgctggaagtattgtgatgaatataggaaaaagagcatcaacaactcagtaacatctttagcttcagacaaacgctcccgcatatgttcatcgttgaattcatcaaacacatagctggttgattctgtatggaaagtaaagatattttcacccactactaaaaaagtgattgggtgtgaggtaaagtgcttaatcgtgttggtcggccaaattggcacatcgtaaacaagcaagtggctcttagtatggacgtcatagtcatagtgaggacgttcgtgacggtcagaaatataagagataatgtcaggcgtaaaattaaaatcctgctgcaatctctcactgtcttcttcacttaaattattgatgtcataccacttatactttgttcttaccggaaaattttgttgtctaatcaaccagctcacctcaacttttattttattacctagtaaatggtaccatttttctcaattctttttccacaaaaaaacagaccttacggtctgctctttgaaatctaattgctatttaattttattgcttccaagcagcatcaaatttttgcttaccagtattaatttggatgttagtattttgacccttttgggctgcagcaaagatattttgcaaaatgctgttcaattggttgtatgcagcatttgaattcttagcaacaggaacactgtacaagttcttcatagcatcttgaagtttagcaggaagcttaatgctcttgttattcttgtattcactagattcgattgcactattgtttacaggaatgtaaccagtagcattagcccacttaatttggcttgacttagatactaagaacttaatgtacttaaatgcagcagctttttgttcagcgctagcgtggttaaacatgtaaatatcagtaccttgttgcatggtgtatttgccaggacgtggagcaacatcataagtaaacttgttacctacaccttgcttaacaaagccttcacctgcagaagtaccaacaaacattgcaaccttttcgttagcaaatggacctgaaaggtagtgttctgaaccagctactctgaagtaacccttcttaataccatctgcatagaagttgagaactttctttgaagttgaaccactgaagttaatcttatcagtaaagttcacgccttcgtccttcataccaagagtgtagtagttggatagtgaatcaaaaccagcacctacaactttgtggttactcttcttgtagatagtttctgaaacatccttaagttcttccatagtagttggaactttcttgatgccatatttcttaaacatggtcttgttgtaagtcaaagtttcaattgacttgttaaatgggataccgtattgagttcccttaatttttgcaccatcaagaagttcagttctaatgtcagatgcctttgcactgccccaaccaacattcttgttgttgatatatggggtcatgtttacaagcatcttgttttgagctgcgttccaaagccaacctggataagcttgagtaatagtaggtaagttatttggtgattgcaaagttgagttgatcttagcttgcaaatcattgtatgcaccttggttttcaagcttaacagtaattttagggttcttcttttcaaattcattagttaattgctttaaagtagaaccttgtactcccggcatagcgttccagaagacaactgtagtcttcttagtaatctttgatggaatcttctctgaacttgatgaagaagaattgccgctctttgaacaagcagcagtgccaactagggccaaagtagcaacggcagccatagtaagtttcttactaaacttcatttggataaatcctcccaaaaaataaaactaaacaacaatatgtttttgatttactaaagcgtgattgtttgaccacgtttaggtaaaatccgttctccatatgggttctcttccagctctggatgcaatgtgtgcaccggtactaaaacagctggttgaaccccagcaatgatttccttgagttctttttcatcggcatggcctgaacagcgcaacgccttatactcaatatcattgttagctaaagcctctacaaatggtttgtaggcaggatcaaaatcccctaatggctcagcatttgagtggatatacaaaccacccttttgcagcttatcataatcggtgacaacttgccacatgtatttatgattatctgctaaaagctcatcatagctaacttctagctctggcttaaggtcagcatagtgctcctcattaggcatgtaatagtaaggatagtcttcatccaaactttcattaatcaaatgggcacgctgagcatgtaaaacgacctttcttggtgaatcggcaatgattcgcaataatcgttcaacattagtaggataagtattaaaagtgatttggcgttcaggattagccttttgcaggcgcacgatttcttcagttagttctacttcattcttagggccagtaaactcttcactgttttcatcatgcttttcttctggccaagaaacaccagtaccttcaatgattagcatatcgctatttttagctgcctgcataaagtcccgcacccaatctggatgatagccatgcaagcgaatgtcgccagtataggcgatttgcttatccggtgtcttaactaatagaccagtagcaccgtaagcgtcatgatcactaggatatatttccaggataatatcgcccaccttaattggtttcttgtattctgccgcgatgattggacgagtataagtccgatcatgacctgcagcaggaagcaagaagtcgcccttttcattcaaggctggcaataaatgagctgtaattggacctgcataaagtggaatttctggggccaaaaagttcattgccttactgtgatccaaatgtagatgcgaaatataggccgccgcatgctcccagcggtcagtatcaattggcttacccgttaatttaggatcgtaaaaattaggcacatccccgattaatttatttttaatcagagtttgataactttcatctggcaattttaactctggccgataaacttcccccaagtcaaacaatacatgcgatttgttataggccacttcaatcatcggtccaccaattgtggttaaaccattataaaaagttactgtcgttttatcctttaaggtcattgcgcactactcctcgaataatttgctttctaaagatgaagtacaaaatcaagattggcaaaacagtcaatgtggcagcagcaagttgaagttgagtttcactacctgcatcagatgcaaatgaagttaaaccattgttcaacaatctcatgctgtcttcgttagttaccaataatggccagaggaatgaattccaaccagaaatgaaacttaataaagcaacggtgaacaagccacctttagacattggcaccaaaattttccaaatatattcccaatcactcgctccgtcaatcatcgcagctttataaattgtctgtgagattgaaccgaagtagctttgcaagtagtacatgtagaaaattgaagttaaaaatggcaataccaaaccaatataagtgttcaacaagcccattctggcaatggtattgtagttagtaaagataattgcttcaccaggcaccatcaataatgataaaagtaccatttgaacaacacctttacccttgaacttcaagttaaccatggcaaaagcaccaagcaaggcgttaaacaaactcacaattgtcgttacactagctgtgataaaagtgtttaggaagtaacgagtaaatggagcttgggcgaatactttggcataatttgaccattcaaaatgcttaggaatgattgttggtggaatagtggttgtttctctaaaactcattaatccacccaaaatcatgtagataaatggaaagacagtaatgattgcgaaaatcgctaaaataatataagcaatcaaagtgccccaacgaatcttcttcatcctttactgtcctccaatcttcttcatcatcttgcgttgcaagaatgtgacaaacataatgatgataaataagacaaccgttgcggccatcgctacacctggagtaccaacaatttggaacttgttatagatgtagaacactgcagttgtggctgagttaccaacacctgcttgtccattgaataaggcataaacagatgtataaatcttaaatgcagcaatgatattcattgttaataagaaggcgatcgttggcacaagctgcggcattgtaatacgccagaacttttcagtaccagttgcgccatacatatccgcaattgtgtagtaattagggtcaatgtttctcaaagcccccatcaagataacgatgttaaaagctaaagaagtccaaacaccaaagatgataattgtcgtcaatgacatcgctggatcatcaatccagttcggtgttggtaagtgaaccgccttgagcaagaagttaagcaaaccatagtcaccgttaaaaatataacggaatacgataccaatagcgatagttgacgtaacatatggcataaagaaagtcgtttcaaagaatgacttatgctttatcctgctgaaaataaaccaggccaacatgattgaaatagccaaagcaactggcacagaaattagggcatacaaaatagtattcttgattgcccgccaaaattctggatcactaaagatatattgataattgctgaagccactccaatttagattaattaacgagccgctttgaaaactcattacaaaggcccgcaaaattggataaatactaaagaaagtaacaaagataattgttggcgctaaaaagagccacgcctttttctgattgctcttcattagtagacacgctctccttccttagtaaacaggaatactcgatcaagacgcatcttcaaattgatattatcaccaggcttaattggtgtctcaaggttgactaatgaacgagcttgtaccccatcatgggtaaacttcaaaattcgttcacgaccgattaattcgacatcatcaaccttagctgaaactgcaccatcttcttcgactggcaaaatattttctggacgaacggataaaacgtactcgccgtcagttaagtcacgtttaaaacgatccttgtctaaatcgtccacgttaatttcaaaatctgagccagtaatcttgccgccattaacctttacattaaagttatcaatcacaggattaccaacaaaattagcaacaaagtagttatttggttcaagatagaagttttgtcctaagtcatcttgttggatcacgccattattaaagagaataatcttatcaccgattgacaaggcttcttcttgatcgtgagtaacaaacaaggtggtaatacccacacttttaactaaagcacgaatttcttcacgaatcttcaaccgtaaacgtgcatccaagttactcaatggttcatccatcagcagaatcttaggttgttgcactaaagcacgagcaatagctacacgctgctgttgaccaccagataaattgcccggcttttgatcagcaagttcggtaatctgggtcgttgccatatatttttcagcaatcttcctcgcctcatccttaggcatcttttgcttgcccacagtcagaggaaacattacattctgaagtacagtcatatgtggatataaggcatagttctggaaaacatagccgatctgacgatccttaggtgctacgttaacaactgacttgccatcaaaaaggatgtcaccgctagttggattaagcaaaccagctagcatatttaagatggttgttttaccacaaccagatgggccaagcaaacatacaaggtcacctttttttacggaaaagctaacatccttgattgcttcatgaccgttatcataaacctttttaaggttctttacttccacgaatttctcatcattcataagtttcacgcaccactatatattgatttaaatttttaaatttttctattaattctaagctaaatatacgaaaataacaaataattttcatttgaaattcggggtttcaacgactttgtgaaatgcttctcagcaagtattcggcttttgttcgcatttgcttttatttttcacttatttctttttaaaaattcgggtttactaaatattgtggtaggtaccaaaaaagccatgaattagtcatggctttttgtatcataagttatctccacgttcaaattgatattttgaactattcaaggcttgacgaaccaacttgctcatcaagttcttagtctttttggtaatcacaccagcagtttcatcattagcgctagttaaatatttaataagctctctgccttccatatttttagctttttcatcaataagatcaattcggccaataccgtagctttgacaatcatcacgataggcgtttacctcataaatatattggtgatagcgtggttcaacaagcacttgtaaagttttatacaaccagtaagcactactatctgaattaaccatatgatctgccaccttatagttaagtggtgtatcctcaatattggtgtagaaaggaacatatggtgaatatgcataaaagcccatattaatccattgaattgcagccatcttggcaggaacatcatttctaatttgcaagatgcttgattcttggtttctgtctaaagcaatagaacggaacatcttttgttctttttctgaaccagatgaaaaagtgtccattggatcgtatggtgtaccgttatagtgactagttaaaaatctttgcacatcttcaacaccaatcttcttttcgggaacgcgcgtaaatggcatttcttgactagttgggtcttgttcaatgcttggattaaacaacttctgtccataccaagttcttggagtattgtaaaaagcatcagcttcatccttagtaccaaaaatatctctgaaagaaaagctaccgtcagtactattgtttaaatgattcttttctacgaattctcgaataccagctgaatacataaagttatctggatcatcaaagtcaacattttgaatcaccatgatgttaggacaaattgcgtaagaatcatcaggaacacgagccgcaacccattggtgacccgcgccagtttccagataccaaacttccttgttgtctgaaaaggcaataccgttgctttcaccggtaccatatttttcgattaattgccctaagcgcttaacaccttcacgagcagtcttcacgaatggcaaagtaatataaaccattgagtcttcgttgattccatttgctactaaaggatcatgtcctaagcagcgagcattagtagcttcagtttcagtggctgacatagcaacgttatattcgttaatgccttgctcgtcccagcgaccttctgaatcatcagcagtagggacagcagtccatttgcagccatcgccctcaaggtgcatcttaaagccgttatattttgatacataatcttcatcataatgacgggctgggtttaccacaaaaactttttcgttaatgccaccataaccgtcttcgtcacgcgcaatcatggttgatccatcgattgaagcgtccttaccaactagcattgcagtacagttatcttttttcattattgtttgtacttccttttttatttcagtaataatttttcatattattaattctactactcattaacctgcatttgccgatcaacttttgctcgaccgttattatagttaaaaacataaccgggctgcacgttatagagatagacattgaagtttaaactgccatcagttgaaacggcctgcaaattcacgccgcgggccattaactcattaccacgaaaaacagcagttgcttgataaattacacgcttattctgccgcagtgctctcctaaccttagcctcaaaaatagtctgaatcttttggttagaataagcagattgcgtaaacaaattcttaggattattttggtcccctgattgattgcgtggatcataattgccgctttgatcaattccagctgagactgaataggcaatcaagtggccccgattatagatttgggtaccgttacggtgattatagtgccagccagtcggttcaacatattgccttactcgcaagctatcattagccacattgcgcttttccaaaaaggctgtattagagcgcgatgttcgattcaatgaatcaaggttagagtaaatcacccgatttatcttccatgcgcctttgaccaaagtcgacttatcatggttgacttcggtataagcgcgactgccactcttaaaattcaaattagctaatttttgataatcagttggcgatagacctccataattggtcttggcttttgatgcatcgctaattgtattagttacatgttcatcattattgccagtaaagtcacgcaaaaactggctaccatttggatcgctgccagctttagtaaaaactccccataaaatcgcgattaagacaattaatgatgaaacaaccgttccttgtttttttcgtcttcttcgtgtcatctttttcctctaactacgagcccaatcatcaagcatgcttaagaaaaaggtctccgaaaaacgcttaatcttagcaccatttttgatcaaatcacgtgctgcattcaaatcctgattatcttttctaaagaaatcttgatcacccatgattaagtaattagtcgttgctaacactgaattgtcaacttggccgcccatattgttgatcatcttgcccgcttcagcttcgttcatatgaatattgccagacaaaacgatattcttattttgaaccggattgtgccaacctaagtcaacataatccaattcgccaatagttaggtcgatattcttaatcttgctttgtgccttttccaataaatcatcagtaaagtgctgggcaaagtcatcataaaccttgatcgtatcaagagaatcctgcaaaccgtggtgagcctcaacttgagcaattccagcccgctgcatgcagtcaagcagacggttatggcgctcgcgtggataatatgtccgcgccaaacgcaatacgtcaacgtaatcattatcaagcactggtaagccatatttttgacttaaatcatacaaaaagttcaagtcaaaattgacgttatacccaatgataacgtcatcaccaataaactcacgaaattcacgaatagcctgctcagccggaataccttccttcccaatttgctcttcagtaattccatttagcttagtaataaaagcaggaacagaattattcttggaaaacttcaccaaattagtatattgatcaacaatttgaccgttacgtaccttaaccccacctaattcagtaattcgatcgcggtaaggatataagcccgttgtttcaatatcaagcattgtataattggtcaaaaagtcaggcttttcctgtccttttttacgcaacttgtcttgcgcaccggtcacatgtaaaattccattttttatgtaaatactcattcttcacctatttaattatttaatcaaattcatcagcatctcgtgcgaattgctatcaaaacccattgctcgtttcttaagatcagctggcaaatctgcatcagctaaatcagcggcaatataatgccaattaggaaattgctgcactagctttaccattggatcaagtaattgaggactggtctcatctacgcctaattccaaaattacgacattcttgtcctcggctcccgttagaaaccaacgaaaacgcgtattagcatcggtatcagggaagaagttagcattcagcggcatatgcaattccattggactattgcagtcctcgcactttggtactaaatctgccgttacgttgccgttcttaattgccgtcataaagcgttctactacttcatggttatccttttgaccatgattaatcccgctagaacactgcattttagtccaatcaccaaaggcattgaaaattcgattttcattaaagcctgcattttcaaaaaagtgcccgaatgtactggtcgcaataaaatattttttatcacgaattagcttttttagagcaagcatcgtctcactaggctcatattgtaaggaatattcgttgattagctcactccaaaaagcccattgctcgctccaagtatcaaatctcttatctaatgcatccccaattgtatgcacatcatacttatctgcaattttgccaaattgatcatcaaagccttcttcacttaggatatctagtccctcttctttggccatgccattaccagccgttacgatcaccgtgttagcatttttcagccatttttttgctgtcactaaatctgccattttatctctttccctttgaataacctgtcaagcgtaattgtccattaatgtattctcctaagaaaacatcactgatactattataacctgcctcttcaacttgttgctgtaaccaagcttcgcttttgtgaatcaactctaagacatcaatattagcctgaccatcactaattattgggaaacgaatgttagcttcatcattttcaataatagttaattgcccgttttgctcaaagatacaattcttaatcttttcaacagagtagatacctcgactgcgcaatttaaacattaattcattagcggagattcctgctttcatacagttgccaactaacaccttgccatttttaattacttgaacaggtttaccatcgataatccctctaatccaattattgtgatcacggctgaatttcaaaataaaaacaaccaacgtccaaacaattagaactaggaaaaactgaagaattgtaatactaggattgtaaatcaagccaccaataattccacctaaaacataattctgcaactgatctaatgcagtcgtaggagccagattagacttaccaaagacattgatttgaatgattaaagttaagataccgagagcaaacttaatgaataattgtgtgtaatctagctgcattattttattacctctactttatgatcaattacatgggcttgcgttaatgtgtaagtattgcgatcatcattaaggtttaactgataatcaatatttttagaatcaatccttacgatcatgccattagttaaaaccgttgaactaactaaaacatcagaagtcgaaacattttcatctttagcaatcgatttgatgaatggcacgatttgaatcgcctgtgatttttgcgtattaagttgcacatatttttcatattgcgtaccggcaaacaaaagcaaaaataataaggcaataatacccaaatcgcgatacttggttgcaaaacggttatgtaaatatagcaaagcaaaaattatcattgctaacgccgagactgtcaagaagtttgtgtaaataatctctctcgttgattgacttttttatttatcttttaatcaaaataggattctagggtgtctcgaacttgcccaaatcctttatgaatcctgttaaagtaacggtcattgtaatccattgcctgaactccaataaaggtgtcaagcgactgctcagttggaaattctgttttaggcttggttttccgcttaagcctgttgttaaaggattcaatcatgttagttgagtaaattgaagctctaatagctggcggatagttgtaaaaggttaacagatcaggctcaacctgtctaagatctctaactacgtttttgtaggctttttcccagttttgatagaattcatgcagcacctgtacagccatttctttgtttgactgagtatgaatctgcttgaattcatccagtgctttttttcgatcgtcaacccgcattttggcactgatattacgcatgacgtgtaccaagcagcgttgaaaatgcgctttaggataggactggcagatagcctctttcatgccaactactccgtcagacaagaagagctctacctgttcaaggccgcgactcttgaagcctttgagcatttcgctccaaatctcaatattttcagtaggcgcaatacagtagtcaatcacttctttatgaccattaggtttgataccgatggcgatataaactgcttcgcgctcataagtgacccgcttaagaggaatataggtggcatcgagataaacgcagaagaacttatctgacagatgtcgctgatgatatgcctcaactttgggaatcatttctttagaaatattggaaaccatagctggagaataatagccgccatacattttctcaatcaaatcagcgatttctcgggttgtgacgcccttggaatagagcttgataacagtttgctctaaaacatcagtatgccttttataatctggcatagtgtgttgatgaaactcaacgtttctgtctctaggaactttgatttctatttgtccgaattgcgtatcaaccttgcggtaataagcaccatttctagagttgccagtattccagccatttctggcatagggatcatagcccagaaaggcagtcaattcagcttctagcaagttattaacagcctgttgtagttctttgcgcaataaatcatttattttgtctggattgaatagagcttgagcaaaatctttggtaaaatcattcatgaaggagttcttctttctgtatgtgtttttttgttcaaaccaatcatacgagaaaggaactcctttttctaatgtttaaagaaataaatttaaggaatcattcatccttacacaaactattttacagtctcctaacgccgccaccaacatcaaagcatataatactgcctgattagtattctggttattttgaatatatttcattgtataaaaggtcatgctctacctcacccttcatatttttctttcattctaacacagaaaaaaagtagcactttcgtactacttttactagaaattattcacttttcactattattaattatttttgaatttcttttaatccagctttgcgacggcccatgttaaaccatggtgaaacagtgaaggctaacacatcattaattacatagatcaatgaattaattgccatggctaagtttgcatcaccttgagcataagttacgcccaaaagaatcaactggaagacgccactagcagtccaccaaaagtattgattgttgtaacgcataaagcacatgatcccagcagttaatgaaatagcaaaactaatagcatcaatccaaggacgaggatcattggtaaatttaccaatcaaaaagccggatacaacataaacaagtaaagtaccaacaatagcaacaagccattcctttgaaccgaattttcttaagtgattcttagtgtcatcattccatgatctaacagcaataataactggtaaatctaaagttgcaatataagcaatctgttcaaaaatggaaagataattcttagctgaccaacctgcatagataaaacaagcagctgaaatcaaccccaaccaaccattaattgctttagtagcgttaattgccaatacacaaagtgtacccaaaagcgtaccaataaaagtaatcaaagttacgcttgtaattttgccttgaatcagcaaagctaattgaaatccaaacgcaaaaaaccataaacagtaattttgaactggccagcctttcaattgattaaatagccaaacaaaataattttcgtgttttctttccattgtactgagacgtaaaaagtagacaattaaaatattggattaatagaggcttgacttcgatactctttcggggttaagccttttaatctgctctttatcctttcgttgttatagtattcgatatattcctcgattgcttgagttaattcttgaagattatgatacttgtattcttgatcatagaacatttcagttttgagcaggccaaagaagttctccattagcccatcatccatggagttgccctttctggacatgctttgagtaataccatggagttttaaagctcgctgataacgagggctttgatactgacagccctgatcagtatgaaaaatgcagttattaagagctgtttctttggcaaaagccttgtcaagcattgtcattactaaatccatatctggatgtttggagatagtataagaaactatatcgccaccgcagccgtctagaataggcgataagtaaagcttttcattattaagatgaaattcagtgatatcagtataccattttgtgttaggcagggctgcgaagaaatcacgatgaattaaatttggagctattttgccaatagtacctttatagcttgaatatttgcgcttattgcgcctgatgcctttaagacctaatttatgcatccaatagcgaacggttttctccgtaactttccagccctctctgattaactgcaaagctactctgcgatatccatagcggccttgatgatgattaaaaatctcatggattctagcaataagctttgaccgtttaggcttggcgggctgtcgtttgataatcttgtagtatgagcttctggcaattataggtagctcagggtgctctgcaatcgcagctaatacataatttaaactaactttgaattcttgccttagatccgtaatcaccctagctatttcttctgatcttcttggtccaaggcacttagtttttttacgtattcgttcacaatacgcaatcgcaagttttcttctttcagctgctggatctctttctccagttccttgcgagatttctgcttttctttggtcacgggcagggcgtcctttctgtttgataatgacattatacccgtttttcttatattctctaatccaattgttaagcatgccaatacttttaaaccccagttccaaagacagctgtaagtatggtttattgccaaagattgcttgttcaatagttcgctgcttaaactctttggaatagctttggtttttagtagttaaaatttctattccatgcatatcaattaatctaagcatatagtctaaattagctagattcattctgtacgctttagccaattgactgattgagatattttcatctttccatttatgataaatttctattttttgttctttattaaatttagacatagtaaacattctaagctaaatagtgaattagttatccgacgggataattgattcactatttttattcttttgtagaattaaagtagtggtaaaacgatatgccctgaggtctttagacacttgatgtcgcataataaactggcagttttacttaagttttcaatagtctcttcgaagaatgtggacactagatgtcgagtttagaaaattagatctgatttcttaagtaaatacgttttactactaagttttggaggtttttattatgcaagttacttttggaattgatgtaagcaagtctacttctactgtttgtgaactaattggtgaaagcaaaaatgaactaaccattactaataatcgtcctggttttattcaattgcttcatgaattaaccgctttttctaaacatccgcaaattatttttgaagctaccggtgtttattcacgcagactgcaggcttttcttgaagactacggctatgaatatgttgttattaatccgcttaaagccaaaaaagagatgaatatggggctacgctacaacaagaccgataaaactgatgcttatcatttagctttaattcaaagactttatcgccatccggttaatcaaagcgaatcccaaacttataagcagcttaatgctttgagccgcttctatgaccagctgacaagtgacttggtaatagctaaaaatcgacttcaccaagctctacaatcgacttttcctgaaattgaaaatttattttcttctgctaaaggtaaaaattactggcaaatagttgtgcgatatcctcattgtgacttagtaagaagagaagataaaaaacagcttattaactggttaatgagcttaaaggggattgcttttaaacacgctctaaggactgcagataaattaattgaattagcttatcaagcttatccagttgtatcttgctctagcatagaagtcgagcaagtgcagtattatgcacacagattgcttaatttaagtgatcaaagagaaaatttaatcgcaagaatggttaagttagcgaagtctttgcctaatcatgatttagaaaacctagaaagcattccaggctttgcacagaccactgctgtcagagttttagcagagttaggagatttacgcagatttagtaatcctaataaaatcaatgcttttatcggaattgatccaggcagatatcagtcaggagaaatggactctaatttaagtattactaaacatggcaatgcagtcgcacgtaagttgctttatcgagctattggacaaattgataatgcagctaagacaaatccgtgtcatatagcagattattatgaaagcaaaaagctatcctctcaaaccaaagggttcaaaaagatagctattgcttcaattcataaactaatcagaaccatttatgccctgattatcaatgatcaaccatatgattacaacgtagccacacataatcaaaaagactttagtcgtaattaattgatcaagtacattataacgctaagcccaaaaatcagatatggatctgggcttatttgtcgtgtctaactaaaaaaataaatcgacactaaaagatgtttaagttgaaatttaaacaaaaaatgaagccaaacttcttattatgcttgactttacgtagaaaaagacctaaaagtgtctaacttttaggtctcagttcacatcctattcaacattccccttttttattttaggttgcaaaatacaagatcttgtgccttatccgtgctatgtaaaaaaacatcgatatctagtatagtggaccattaattaaatacaagaattgacatttttaatttttgcgttaataacatatttctatttccgtttatcaagcaaacatttattaattttttctaaacagcaaaaaaattttgttccttttagtgacacagtgtcatatgatatatacgtgattattaatttatatttttatggaggtacactcatgtttaaaactaagaaaacgcaatttgctatccgaaaattagcacaaggcgcctcagcagttttactttgcttcggcatattgggcggagcaagtgcacctatcgttccagctgcaactacagatgacccaacaaaaacagtcactgaaagtacaattaatagtgagaatacttctttcaatattgaaaccaccaccaatgcatctgataaattcgcttccatcagcaaaaatggggggtacaacggtagtgccaaattctgctgagccagtttctccggatcagtccattacagaaaatgataatcagcaagaaaaaactactgtagagaattctactgagatatctgagcctgtcaaagacatcaataagtttgataatgatgccaatgttgataaagacgaaacaatcactgtaaaaaagccaacaattaatgtcgacactgaaaaggtagaacaaggcgatgaaacagagaaaagtaaactcgaagaaattaaaaagtatattgaggacgtagccgcaaaacatccattaggcattgccggaattttccacctttttggtaacgaaatagatggatctgctcatattgcaggaaatgtcgcaacagacaaattaagtgctggcaacttcggtactatccaagatgccactagtaacttgactacttgtgatattcattacatcggcagtattgatcatttgaatcagattgatggcgaaaataaactagttatttttggtccagatgttgaatataaatcatacgaaaatggtagttccattcaggtaaaaataaatggaaattggcaaaaagtaggaattccatacaacaaaactatcagagctgaccaaattctagatattcaaggcgaactagataaattaagcgataaatcagacgaatgggctaagcaaacgcaaaccgaaggcgtaattgctgatttcaaggagggtaaatagttggatcgacgtttctaatgctatcaaggatggcagcaaagatcctatttatgtaactattgatgcaaaatacctttcaggcaataacaagcatgaaattgctattaaaggcatccctgcagacgcagaaacaccaatcatcatcctaaatgtaactaatgttcaaaatggcgatttaaccgttagcacaagacttgttttggattattcagaccaaactagcatcaatggcgtaagtgaaaaaccatctcaacttaataagttattatggaattttggaacagatgttaaaaatttaactattgaaggagacttccatttaggtagtattttagctactaacgcacatattaccgctaacaaaaatgttgacggtaatatcattggtaacaaaatcactattaaaggtgaaactcaccgttgggacctaactccgccattagtagaagttgaaactccgccggaggatccaaaagatccacctaaagaccccgaaaagccagagaatccacctaaggatcctgaacctactcctgagcctgaaccggaactaaagcctgagcctactcctgatcctgaagaagagagtactcccccattaccagaagaagtaattcctccaactgataatgaaaattcctctgacttcaaggaagaggacactgctcctctaccagaatctgttgtagaaaaacaagttaaaaagaatcatccatccccttcaactactgaagaaaatattgcacctcatgctgcgactatcccaacctcaactataactgaaaaagaaacagttttacctcaaaccggtgaaagccaagacaagctaatgacgattggactcatcactactagcgttgcttcattgtttgcagtattaggcacagtaatcaaaaaaagaaattaattaaaaatgattcaattcaagccatttttattcttaaaataatctagaattaagtgaggattaaaccatgttaaaaaatagactaaaaatattccaacaaattcttcctactaaggcaactaacactccaaaataccaattgcctatcaactattacgatcctgaaggcagcatggttggcacttattctggaattaacttggcggcaaatgaaactatcactcaccaccagctcaaaagatttatcaacattcatcttcccgaaaactacgaagtttttccttactttgcttatcctaaggagaatatcacctgtgaaaatctgcctgatgaaataatgatcacaatcagattatctaattaaaaaaggcgactcgattgagtcgcttttttcattgcaattgatattaatgttgcgaagcaccagttgtagtatctggttcttcgtgcttttcttctttaacttctgcagccttagttgaagcaccagttgcggcgtctggatcagaatttctacggtaagttgcaccagtagttgcatcatcatctactaccaatttttgaccagtagtctcacagaagtacttaactaatggatataagtctttgacccattcataaataccagcatagttaccttggtcgtcttctacacgcttataatagtccacaaccaacttcttcaaattgcctgttggtattggcatataaacatcatcatgacctgcttccttagtccgcaaagcatgaacaacttttttaacattcggaataacgtcacgaacatctgggtgaactgcgcgcatcgtatcacccacttgatctggcgtagctagcattttcttgttaggatcagttggacggttataccacaagaattggttattatcatcaacaaatgtcattttaccaatggtatttctcagcatccaattaagttggttaacagttaacagacctgcatcaagtttgacataatcgtcaccctccgcagcatgaacttttttagctgctttatctagccaatcaggatcatttttatcgattccctcaactgtatacttagacttaccctttgcatcgaaatcttcttttaagtattcatcggcattcatatctttaagccattttggttcagccatagtaagaccccctcgtatgaactttgttaatctaattatataatgtaagtggtttcaattcaacaattttaatatatttatataatatttttactagctggattatatattattttacgcgtggtgctagttaaatctttctagacaataagccaaattataagctaaaattgcaatttccaaccggctttgaaagcctatcagactacgtgctcgattgttctcggcattgtaataggtcagaagcgaaaagtcgctttcaattgttctgcgaatagccatcaattgatgatcattgtgctttttagctcctgtcatatttttacgatatggtgtccaaagttcataacccatttgttttagctgttgatgcagttctttgcctaaatagccttcgtcgccaagaagatagtaattagatggatgggtattttccagcagttcaactgtctccctggcatcatgaactgatgcttttgttacgacataatcaagaatgtaaccgtcatcgctaacaatgacatgaactttgaaaccatagaagtaaattttcttggtggccttataaccaatgttggcataaccgcgaaaaattttagcacgatagttgcgaattggttggcaaacaggtaccggaaagctgtcaatgatcaagaaatgtccattcaggtcaacctttttattcatttcttgccgtatctgataaatcaattgcaatagctgacgtgaacgccgattaaaacgtgagtgtgataaacaattgaaacattcacagaatcttctttgtgattcaattcctgtcttagcttgccagataagtaaagccaaaatcagactgtccgtagttttaatttgatcaatatttcgccgatgagtaaactcagccggtgcatacaaacgataccagtgccgacaaattatcactaaatctttaaaactaacttgtaaatggtggctaaaacgcttaagcttaagacagttcaatcagatcagactcttttctattattactatttacaagtcgagtctaacaagattggacttttttattaactaaaacgatttaactagcaccctgcgtattattttatataaaaaaagctgatcaacgagcaactctttacatctttgtctcaattgtatgagtgtccaaatgaatgatcacgtcaaacatcgctttttcttctggtgaaatcttatgagccacctcaataacagcaatacgtggattcttcaacagcgtcttatgaatgcctaacgacaagttcgggtcaagcgcacttgtcgcttcatcagccagcaaaatcggccgatctgataaaagcgcgcgagcaatttctactctttgaatttgtccacccgacaagccactgccgttttcacctacagccttgtctagaccctgttcctttaccaattcatctagaccagcctcatgaataacttctttcaaatgctcgtcactcactttacgtcctaacgtaatgttgaaacgcaacgtatcatcaaacatgaatggcttttggttaacataggaaaaataattatgggcagcatcccaatttcccgttacatccgtaccattgatcaaaattttaccgtctttgggctttctcaaacctaatagcaagcgaagcaaggtggtcttgccccaaccacttggcgccatcaatagaactttttcacccggcttaactgttaagttcacattctcaaagatgcgtttgtgatcactacctgtaacataagataattgttcaacctccataccatcaaaatgatcgatcttctgcttatcatctttcagcacgtgatgcaaagcgcgctgggtcttttcccacattggcacagtcgacttgacttggttaaattcgttaaaaagagtcacgattggcgtgataaagttcaaggccaaatcgaccatcattactaatgtacccacctttaaatttccctgcagcatcataataccgccaatagtacatggtacgatgaagcaaaacaattcagcagctgaataaattaattctagtgcccaagcttgagtcaacgtcatattacgcagagcgttctccattgcctgggccgcaccagctgctcgtgtaacgatgttggtgcgcacgttataaagcttggtagcctgtgccccatttaatgaatcggacacattttgcgtatagttagcgttagtcgttgcccaaatcttggacttacgtgtaatgataggactagtaatcatttgaactaatgctggcgcaagcgtagcaatcaaaaatactagggtcatctgccatgaactataaaaagcaaaagtaattgccccgaaaaacgacaaaccttggaaaatcatatccaattgtgccgttatccgattagtttcaatctgttttaaatcgttggtcatcagtgataaaccgctcttgatatcaggctcaccttgatcaaccaaataacgcaagttagtgcgcttaaaggtcatattcacgtcacgaataatgcccatctttaccgtttcatagacaaagttactggccataaaacacatctgacctaaggcagtcaaagcagccaggcgaatcaaatgcagataatcatgcgatcctgacgaagcaacattcaacataatttgtaccatataagctacaaagacgatgttgcaggccttgattgcggccaaaatggtatagctaataatttggctttttttagcgtacttcaggctcattaatttctccttttctatcccgttagaaacattatacccgctagcttgtctttttctcaattagatacgataattagagtaatcattttaatttttaatgaaaagcagaaaggaacttttaatgaagactggtactaaaattattactttagacaacggttatcacttatggaccaacacccaaggtgaaggcgacattcatcttctagctttgcatggtggtcctggcggcaatcacgaatattgggaagacactgcagaacaattgaaaaagcaaggcttgaacgtgcaagttactatgtacgatcaactcggttcactttattcagatcagcctgactactctgatcctgaaattgccaagaaatatttaacctacgaatatttcttagatgaggttgacgaagtccgtgaaaagttaggacttgataacatttatttaatcggccaaagctggggtggcctattagttcaagaatacgccgttaaatatggtcaacacttgaaaggtgcaattatctcctcaatggttgatgaaatcgatgagtacgttgcttcagttaacagaagacgccaagaggttttaccacaaaccgaaatcgacttcatgcacgaatgcgaaaagaacaacgactatgataatcaacgctatcaagatgacgtacaaattttaaacattaatttcgttgaccgaaagcaaccatctaagctttaccacttaaaagacattggtggaaccgctgtttacaatgctttccaaggcgacaatgaattcgtaattactggtaaattaaaagactggcatttcagagatcaattacacaagatcaaggtgccaaccctattaacctttggtgaaaacgaaactatgccaatttcaactgctaagattatgcaaaagaagatccctaactcacgcttagtaactacacctgacggtggtcaccaccacatggttgacaaccctgacgtatattataagcacttagctgactttattcgtgaagtagaaaatggtacatttaagggcgaaaattaattaacagatattcaggctggaatcgatttccggccttttatttttaaggaaaatgatatggatgaaaaagatgtcaaaattctgctagttgaggatgaagaaagcgtcgctagcttcgtcaaaactgaattagaatttgaggattaccaagttgtttgggctgaagacggcaaaaaagcattagacctttttactcaagaaaagccaactttaattttgcttgattggatgttgccagtatatgatggcatgaccgtgttacggcgaatccgcaagcaaagtgatgtccctattattatgcttaccgccaaaaattctgcctctgatataagctctgctcttgatcagggactagacgactacctcaccaaaccatttgaaatcgagaaattgctggcacgaattcgggtagtcttgcgaagactggaaaaaatgcggcagcaaaatgacgtccctgatacttccctagaatttggcccattaaaaattgatctgcttaagcacgaattttactgtgacaccgagcaaatttatcttactcctaaggaatttgccttaatcactgaactaatgcgggaccccgaaaaagtcaaaagtcgtgacgagttgcttgatacagtctggggatatgactttgttggtcaaaccaatactgttgatgtttatattcgaactattcgcaacaagataggcaatccctacaaaaagatcattaaaaccatgcgcggcttgggctattgtttgagaaaattagatgataatcatgaaaaaagctgatcctcaaacaactacgcaacaattaacccgtttattcgttaggctatttgtcgctattttaattctggtcaatttggcttttctaattatttcatcggcctatatttattaccaagctgaacggcaaagtgaacaagttgttgaagcagtaaaagaaaatcttgattcaaaatatgactggtcggctatgctggatgcttatttggcaaaacaagacgatgatgccatcattttaaccacccctcaaggcaaaagttattactctgaaaatgctcacgagacctttaaacaaattaatcgccaaaatcattatcaaaacatggtctattccaataagcatatttacttcttacggacggaaaactcgcatgactttaaaatcaaggttgcattaaacattgatcgcttatttcatttaattatttggctatttgggacaatgattgtcatcaacttaatcgctattctgctgagcatcccccttattcgccgttttgcccacaaatggagtcgtccaattcaggtaatgaataatgaaattcaagaaatccagcaaggtgcttcaactgagcaaatcacagtgccgcaacaaccattagagattcgaaaattagcccagtcttttaacaatctgctagcttttcaaaaacaggccttacagcgtgagcaacaattcgtcagtgatgcttcacatgaactcaaaacaccaatcgccgcaattcgaggacacgttaatttaatcagacgccatggtcaagccaaaccagaaatcatccctaagtcactggattatatcgatactgaatcaaaaaagatggaaatattagtcaacgatttactcaccttaggaagaatcgaacgcaatactgaagtcgtcaaaattgatttggtaagaattattaatgaagtagtgtcagaaatacagtcagtttatccacaaaaaatacagactgacatgccacaagtattgaaatatcgtattaattcactagattttcacaacattgtgcacaacttagtggaaaatgcggcaaaatattctcctcaagacagcactattgtagttaaattagctaaaaataaaggacaggtctctttcacagttgcagacaacggaatgggcattgcgccagaaaatcgcgagaagatctttcaacgttttttccgtgaagacacgtcccactccaataaagttaaaggatctggcctagggttagcaattgtcaaagctgaagctgataagtatcatggtcaaattaaagttacggataatagtcctcagggaacaatttttacagtttcttttcctacagaaaaatgaagaaatcttcatttaaactctattaaatcttagttttttaaagctgcttagctagtaagataaatatatcaagttaaagcaaaacaaaaaattatcaatagtttaaaggagaacatattatgaagactattaacttaaagaaaattactattactggcgtagcattactcggcttaggaactgctgcaattaccgcaactaatttagctactgaacctaacgtggttcaagctgcttcaagcaaaattaaggtttcacaaaattcagctgttaaaaagtttaaggcaaaattcaaggcagctaaagtcgaatcaatcagcttagataaagaaaaaggccgttacgtttacgagatcgaaggcttcaattcaacgagagaatacgaaatgaaaattaatgccgcaactggcaaagttatctcatcccactccgaaagacttgatcgagacgagcgtaataaaaaagcattaaatctcagcaaaactatttctcgctcaactgctactaaaattgctcaaaaaagagtatctggcaaggcagttgaatggtcattagatcgtgaaggttcaaagaatgtttgggaagttaccatcagcaagaacggccaaaagagcgaagtaaaaattaacgcaattactaaaaaagtaatcagtgttgaacgggactaattgagaaaagaaggtatagaatagatgaaatttactaaactgacaagtattgcattattaagcgcagctttattaacaggaactgtagcatgttcaaaacaagataattcaactgctaaaactactacccaaaagagtgttacttcatcaaaggttacacataattctgaatcagcaatgagcaaacaaactcaaaaagataatattcaaatcaaattaagccagcaagaagccattgataaattccatcaacaatttagtggcaaacagcttaaaagcattgaattaaatcgtgaaggcaaacattacctttatgaaattgaaggattcgattcaaacaatgaatattctgttaacatcaacgcagaaactggtcaaattggacatgttcattcagaaaagttagatcatgatgatcgaaaccaaaaagctctagatttcaagggcaccattagccgcgacgatgctagtcgtatcgcagaagagcacattaaaggcactagcgaagaatggaaactagagcaagacgaagacactggtaaaacatactgggaagttaaggttaaaaatggtcatcaagaaaccgaagttaaaattaacgctcacaccaaagaagttatttcaactgaacatgatgattaataagattaagaacataaagaaagccgcaacattattctcgaagttgcggctttttattttgtctaatttttggataacttttttaccaataaccaatcagtttgaggatcgctaccaacttggaaagtatgctggctcactttttcaaatccatgacgcttataaaaatattgtgccggaatgttcttttcataaacgcctaaccacatgtaatctttgccttcttctcgtgctgtcttttctgcaaaatcaaacaaaacattgcccaacccgcgatgttgaaaattagtacgcagataaattcgttccacttctagagcattatcacgtaactgctcagtctgagcatccccaacattgatttttaaataaccagcaatttttcctttaaccattaaaaagtaaaaacgactattaggattttcaatctctctaatcaacttttccgtctgataatcttcctctaaaaagcgtttcatgtcatctggtgcagtataaggatcaaaagtcgttttaaaagtttcacgtgaaactttctgtaattctttcacatccgctgttgtaattgctttaatctcgtacttcatcaatatttcctctttccaccgttcttaaccaggtgccaattttcactggcattcttttctacaatttgtaacaaagcagctaattctgttctctgtttttgatctagtcctgtcaaaactatttcatttgaataagcattttctttttctattcgagcagctaatttatctcctaattctgtcacaaacaaatgcttaatctttttattctgctggtcattttctttcctaatcagctgattttgttccagttttttaatgctacgagctgccgtcgtccgatcaacattaagcatccctgctagatggtcagaaataattcccggattttctttaatgcgggctaaatacaggtactgacctcgattcaattgcatctctttaaattcaatattagcaatcgaatcaagtgctcgcgcaatagtgccaatttgacgcaaaatatcttctttcatgtttttcacctaaaaactattatatttaattttgttgtaattgcaacaataaaatataaaaactaaaaaagggatcgctccctttagttaattcatcaatttttctttagttcatttagatcgactacctgatcagctaactgcttaacttcatctcttaagtggtgagttaccataattacggttttatctttttgcgtcaaaatcaatctttctaattgtacgctagaagctttgtctaaggcagaagtagcttcatctaacagataaattggtgtatcacgcagcaatgcacgtgcaaaagcaacacgctgtttttgcccaccggacaactgtttaccttggtcagctaaaacagtatccatgccatcaggcaacttagcaattagatcctctaatccacattctttgatcacttcagaaatttttgcttttgaaacttggcgtcccaaagttaaattccaccctagagaagcagtaaaaatatatggatcttgctgcaaatatgtaatctgatcatgcaaatccttatctgaaatctggttatattccacatcagaaatttcaattttcccctgataatctctaagtaagccagaaatcaaattcagcagagtcccccatcagaatatatttatttttcagtttaaaatttaaattcaaattctcaaagataggcttatcttgtccagaatactgataagaaactttatccaattctagattgcttagtttaaaatcagcaggcaaagctccatcaacagttttaagcggtatagtcttaaatttttctataattggtttaactgatttgaattcttgccaattaaaactaatcccacttaattcagcgaaaattgtactggcaaaaaattgtgccccactgatggtcccgactggcgttaattgatgcaaaatcaaccagcctgtttgccctaaaatgataacttgactgataaaggctagaccattggtaatcgcctgagttatcccggctgttttactataatttagcgcatgttttttaacatcatcagaagcgccattgatctttttgacgattgtttgcggtaaattggcaagaaataaggtattgaagccattcaacacatcattaattgaattaaccaaacgttcattggcatgggtatattctaatgaccttttggccaaaattttagaaaacaaattgggaaccactcccataataattgtcaaaataatcacagtgaccacaagactgacattgaagtacgccaaagtgagcataccgaaaacaatttcactgatttgtctaatgatcatcatgaaatcctcgacaccaaagttattaatggttgtaatgtcattggtcagccaagaattgtaagtagctaccgtttgttgatgaaagcctgaataactcgtctgtgatagatcttgcgcaatgtcatttctaattaatttatccacattttgtgccaaacgggtttgctcaacattgactagacagttaacaatcgcgtaaaaaatataggcaccgcccattaaggcaacccacatgaaaaaacgctcagcttttaattttgcaactgcacttaaagcattagcgctagatattccggctagtgtcaaaaagcctgcattaatgactattaaaaatgtaacaaataaaaattcccactttaatcttttaaaatattgcagtaattccattgattctccttatgagactgtaaaatagtttgtgtaaggatgaatgattccttaaatttatttctttaaacattagaaaaaggagttcctttctcgtatgattggtttgaacaaaaaaacacatacagaaagaagaactccttcatgaatgattttaccaaagattttgctcaagctctattcaatccagacaaaataaatgatttattgcgcaaagagctacaacaggctgttaataacttgttagaagctgaattgactgcctttctgggctatgatccctatgccagaaatggctggaatactggcaactctagaaatggtgcttatttccgcaaagttgatacgcaatttggcccaattgaagtgcaagtgcctcgggatcgcaacggtcaatttcatcagcacacgctgcctggctacaagcagcactcggatatcttggaaagcatgattatcaagctttactccaagggcgtgaccaccagggaaatagccgatctaattgaaaagatgtatggcagccattacagtccagctcaggtatcaaatatttccaagcagatgattccaaaggttgaggcttaccacaaacgcaagctaagcgacaagtttttctgcgtctatttggatgcgacataccttcctttgcgccgagaaacatttgagcgtgaagcagtctatattgccattggcatcaagcctaatgggcacaaggaggtcattgactactgcattgcgcctagcgagaacattgaagtctggacagatatgcttcaaaacatgaaatcccgaggcttaaagcaagttgagctttttctttctgatggtgttgttggcatgaaaacagccttggccaggacttatcctaaagctcattttcaacgctgtttggttcatgtcatgcgcaatatctgcgctaaagtacgcgtcgacgatcgtgaaaagatcatgaacgaattcaaacaggtgcatcaacagacaaacaaagaagaagccacagctgtcctgcatgacttctataccaaatggggcaaggtttacagccatgttatcagaagcttgaaagacatagaaccagatctgctggtcttttataactatcccaagcagatcagagcttcaatttattcgactaacatgattgaatcatttaacaatgtgatcaagcgcaaagctaagcctaaggcagagtttccaactgaacagtcgcttgatgcttttattggcattcaggcaatgagctacaatgaccgttatttcaatcgaattcataaaggctttggtcaggttcaggacaccttagaatcctactttgattaaataaataattaaaaaatcaatttacgagaaagatctatttacacaaaagatttgacagtttcctccttatattaaaaataattaaattaataatactatatttatgtatttgttcaatattttttaatactttacttaaattactgcaaaattaaaagggatcgctcccttttaattagtctacataagcatatttatatgaccattgcgtaccagcagtattatgaatgatgccgtgaactcgcttgttttgcaagtaagctgtggtctgttgataaatcggtgtaatagcctgattactatttacaatcttagctgccgaaatcagatcattccagcgtatgtcaggattattggcgtcttgattgccagcttttttaaccaaattatcgtactcagaatttgaccacttaccgtaattgtaagacgtacctgtcattggaatttgcataaatgtcatcgggtcgttgaagtcgccaccccaatgagagagataaatgtcaaagttgccttgatgtgctcgactggtggttgacttatcaggaatattggtaatatttatcttgattcccttcaattctttggtccattgtgactgcaaatattgggtcaattgatcactgtctgcttcatcatttgaagataaaacatcaaaagtcaaactcttttggccaatctcctgtaatcccttttgccaatatttcttggctagagctggattataatcaactgtatttttcactgcttgttctttagcaaaatctatacctgttttaggatttgcagccaaatcattggcaacaaagccttttggcagagttgagccattgcctaaaacctttttagtcacaatatcacgatcaattgataatgataaagccaagcgaatatttttattattcaaggcctttctattaactgcatttttatccttaaaattataaagcaagaaacgcactaacgaatatggatattgagtaaagtcattattgctcttcaagtttttaacttgctcacttgaaagtggagttaaatccaatttgccctgttgatacaactgataaccagtattgttagacttaactacttgatagtgaatcttgttcaacttgactaccttcttgtcccagtaatcattattcttaacaaatgaccaggtatcattagttccattccatcctttaatcttgaaaggacctgagtagacttggtactgagccttggttgcgtatctattgccatactttttcacaactttttcgttttgcggcccaaatagtggataagccatcaatactctaaagtaagcgatcgggcgatttaacttaaccactaccgtctttttatccggtgcagaaattcctaatgcattaggtgatttctttcctgcaatgattgcgtcagcattcttcacgccactaaaaagataggcatacggagaagcggtcttaggattcaagcttcttttccaagaataaacaaagtcctgcgctacaatcggatcaccattggaccacttagaatcacgtatcttaaacgtccaggtcttaccatctttagatacggtcccagttttagctaagccggctgttggcttaccatttttaccaagacgataaaaactttcgaatacattgccagtttgaccaaatccggtagacttactgatatcaatagtatctagtggagctgtggtgcttaaatttaaagtgccactttgagctgccgacttactactgctattgccattaccacatgctgcaagaagcattcctaatgaaatagtaacgactcctgctaaaactccctttagtttcgacataaattttcctttctcaaacaaaaaaatgggatgtactccaacacggaatacatcccattaagaaccacaactttttaactagttaatcagtaatagtcttaagatgaatcaccacatcagagcatgtcaaataaatgctgtttgtacaacaacattcagtgtattgacattgcatttgacgcttaaacatgtgattcatcatccttcttacttttgataagaataatcataatttattcgatcacgattgtcaacaaaaatctattgtataattatagaaaaatatttggagaaatttttatggaaattataaaatatggtccttacactcttttcacacttattagaacaatcctaacatttatcgtggctattgagcatatcggtatctgtttcttagaaatgtttggtaaacctgaacaacaagctaaggcttttgacatggatatcaattttgttaaacaagaagctgctcaagtttcactagctaaccaaggcatctacaatggtatgttaggtgtaattttgatcattgctttctttattttccctatccctattctttttaacgtatggaaattaattctaagtttaattgtcgtagtagcaatttacggcggattcactgcaactaagaaaatctttttagtacaaatgctacccgcacttttagcattaatttttcttttcatttaaaaatattgcatttttgtagcaaaaaacataagaaaattcaaagctcctagtgataagctgtcaccttgtgattatgtaatatataatatcagtaaacatatagaacataataacgaggtggaattcatgagaaaattttttatcattatcagcagcattattactgggttacttattgggataattggggcaacgatctatctaaatagtcaatcgtcaaaggtaagtaactttaccattcgaactactaatttaacagctcaaccgaaaatgatcagctattctagcaataacctgccacagattaatctctcacaggattccgccgttcagaaattcaaatcattatatacacatgcagtaggtcaactaccttagactgaagtctagggtttagtggcttgttagcttgcgctaaccagaacaccaacttgcttagatacggatttgacttaccagcagtaatcttttgactattgccgatagaggtcgtctaattaccaaagccttttaagtccgcgagttgctagcggactgcagcttttctaggctgcttcttttattttaggattctgccacttgcctaatcctttttctaagatgttcacggccgcattccaatcacgaatatgatgcatctgacagattgggcaagtccattcccgatccttaagggttaatttcttataaccgttttggcccataatactgccacattgatggcatctttgggtggtgtacttaggatcaattgttagaaattctttgccatatagatatgccttataagccagcatgttcaggaaactacgccaaccaacatcagaaatagcttgagacaaggcatgattcttaagcaggtttttgctccttaattcctcggcaactactaaatcgtggtttttgattaatgcagttgagagaacttgtaagaagtcttcacgctgtctgcgaatcttgtcgtgcagtctggcaactgataagcgctgcttttgatagttttttgctagccgcaaattgcgtccttcttttttagcccggcgctgcctgcgagataatactcgttgagcacgagccagcttctttttggctttgcggtaaaagcgtggattagcgaccattgatccatttgaatccgttaagaaattatcaaggttgagatctattccaagttgactctgcgtcttaggcaaggctttaacaaaggcaatatcgctgcctaactgcattgataagtagaattgctcgtcagcggtcttttttatcgtcactgtcccaattctagttgagatatgattaagcaagcgctctttaatcagttttctaaaaccagcaatgcggacaacgcctagcttaggcaatttaatatgcttagcatcaataaacctagctgtcccgttatcaagaaaagcttctggctgcttaggatattgacagttggtctgatatgaccagtcgctgcgttttttatggaaagttgggattccatgaccaatcttacgatagttgttccaagccttctgataattttgaatggcattggcaagagcgaggctatcaatttctttaacacgcaaaaagctataagtatcgcggatattctttggcttagccaatagttcgctattagtgactacttcttctgccaacctagtctcataattattaagaatagaaaaggcaaaaggcattgcttgatattgtctaacagctaagtagcccttagcatgataattacttcgattacgtcctacataagagttgtagacaaagcgctgcgcatcatagtttagcttaatgattttcttttgcttagaactaggataaaagcgaagcttaacgccaaaatgataggctaaactgctcatttttttcatgtgtttcacctcctcgtattatataaattgtaattagtcatattgtgataattaatcaaattagtatttgctttttgatcttcacatgttagcctctaattgtcattggctttggtcaactggtctaggttatcacctcctgcagttttgtctgctttataagtctgccacccagacagttcctttatgctctaactcacatgctgtattgattgcttctttttgctagtccttgagcaattgggattaggtgcagctttcaaagaagcaaccagtgaatacttatactggcgagattgaacttaagaactgtaattaggggttaacatgtgaagatcaaaatctatgatcagaaatttgaaagaaaggaggccatttccaatgaaattatttgtcggtattgatgttagttctaaagatttacaggtcgttgcacttgattcagaagatcaaaacaaacgcttaattaacgatagctttgtcaatgatctttatggtgctagtgaactgaaaaaacaaattttagatctagctcaaaataaacactatgatcaaatcattattggcatggaagctacatctatttacagttttcatcctgcttactttttccaaaatgacgaagatttacaaaagctcaatgtagagactgatgtaattaaccccaaagaaaccagcaggtttcataaagtctttgaagaaagtaaaactgatcctctcgatgcttattacattgctttgtatctaagctttggacattatcgagtaagcattgccagacaagacaactatcttgctttagagcgtttaacgcgtaccagatatgaattagttcaagaactgactcgtaccaaacagcacttcattgaagctttatattatcgggttaataaactaatcactgtcgataaagataagattaatactcctcttttcggtgctacaatgatgtctattgtaaccgatagtaaaactctggatgagatcgcggatatgcctaccgaagacttaatttcttacttacaggttaaaggcagaggacgcttttccgatccagataccttggctaaagcaattaagaaagctgttagaggttcatatcgcttaggcaaagtaatgactgattcaattgatgcagtgctttctgttcattacaacatgattcaaagctttaatgaatctattaaagatctagaaaaagcaattgatcgtatcgttgatgcattaccagaaagcaaaattctggaatcaattcccggtattggcaaaacctatacagctggtattatcgctgagatcggaagtatcgatcgctttgataaagaagaacagctggctaagtatgccggcctaacctggaatcaatatcaatcgggagatcacagcaacgaacatactccaatggccaggactggaaacagatatctaagatattacttgattgaagctgccaatctagcaagattacatgatcctgttttcaaaaaatattaccaaaagaagtatgatgaagctgtctactcgccgcataaacgtgcttgcacattaactgcaagaaaattagtacgagttatctttaaattgctcaaagatgacaaactgtacaggacaccgaggtcttaatttcaaaaattggtctaaatttaaaagtaaacaaaagtttaacattaaaaaaatcaacctttaccaaggcttagtttcatatactcaaatttatgatcaaaaagaacaaatatcatcgcctttcatttgacttattaccacatgactcatagattagatatttatattttacagggaagtcgaacatatgtctctattttttaataaaaaagctgactgctaggtcagcttggtcctatccatccccacattaaaatacggggattttcgggcgtttttcattaaatcgatcacacttagtttaagtaaagatatctatgtttatgacatagtaggctatgatgaccgtaaagactgtactattcaagttgacgcaactaataacaagattctaggtcagtctacgcaggtgcttgattatgactacgaaaaagatgcgtctttgaacctaaaaaagacaatttcacgccaagaagctaatgaaattgccctaaaagaattcagtggaggaacaccgatttcatgggaattaactgatgacaataatcaatcaatttgggaagttaaaatgatccacggtaaacacaaacataccgtaaaaattaatgctagaacaaaggctgtaatctaaaataatccccaacttatgcacaagttgaggattattttcttatcttttatctaggttgactatctgcacgtgacttgtaatcaccgttttcagtaccaataattagcttttcgccattcttgataaaatcaggaacttgcacaactaagccagtttccatagtagcaggtttaccaccaccagctacagttgcacccttaatctctggttgtgtttccttaacggtcatttcaacagttgatggcaattcaataccgataatcttgttatcatctgtaaagtccatatcaaccataatgttaggcatcaagaacttaacgtcatcacccaattgatcagctgaaacttcatattgatcataagtatcagtatccatgaaagtataagtattaccttcgccgtaaaggtattgagcctttttcttagttacttcaactaaatccactttttcagttggacgcatggtcttgtggacaactgcaccactcttaacgtcacgcaaatccatttgcataacggtattacccttacctggcttatggtggttagcctttaaaactttgatcaatttgccatcttggctaaaaatcataccttttttcaaattaattgcttgtaccattatttcttctccctttaatttaaacttacctttcgactagtttaaacacgctggaggcaaagcaaatttttttatcaacagtaaataaatcgtattcataatacctagtataccaaattagatgtgccgcaggtatatccgatcaatcaaatgtccgtcagtcttatgcaaaatcaggctagcacgttccttggttggcgcaatatattcacgcaagttgaccagattaaccatctgccaggtttcttcagccaattgaattgcatcttccagcggtccattagccattttatagtaaaaattatctggcttatttttatttaatttaagtacttttctaaagcgttgcatgtaccatttttcaatcaaatcttcttcagcgtcaatataaattgaaaaatcgaaaaagtcactagtcacaacttgtccactctcgggcaattgcaatgtattaattccttcaataatcaatacatcaggattttttacatgaccatatttcccaggtactatatcgcttaattcttgagaatatagtggataaacgatatccttctttccacttaaaacgtctcgtaaaaaatcactgagcaaagtcatattgtaactttcaggaaagcctttgcgaggcattaaattacgccgctttaattcctcattagggtaaataaaaccatccgtggtcatcaagtgtacctttaattctggataggttctactgagcaacaattgtaataaacgcgcagtggttgatttgccaaccgcaaccgaacccgaaataccgatgataaacggagctggtgaaaaacttttatgcaaaaatttgatttgtgctttttgcgcattctttttttgttggtaaactaagtgtaagtaactgatcaaactggtatagatctcatgcacgtcggttaggtcaatcacgtctcctaaagacttgatatcagctaattcttctttggtaatattgactttatctaagggagctaatttagcccattcatttctgttaaaactcgtataatttctcatatatcgtatccatattccttctaaaacactaacttattataatagaaagcgctaaaaatatgaaaaaaataatcctattcggcgattccatttttaacggatatcgtaatggtcaaaatacaaacctagtaactaatttatttcaacaggcactaattaattatgcacaggtggaaaacatttctaaaagcggtgctaccacagttgaaggcgtcgattatttggagcaaatttccccagaacatgatctagttgttgttgaatacggcaataacgatgccgcaacagcttggggcattagtccagaaagctacgaaaagaacttggctcaaatccttagtgcagtaggcaaagccattgttgtgggattgtgcaatcccaatccagaaagtgacatttttcaatattatggtgctgaaagactcgatctttttaacaatatcgcccaaaaagtcgcaaaggcacatggtgcacaatttgtggatattttacctgcaatgagaaacttaaaagacaaatcgacatattatcaagccgacgggcaacatttaactgatcaaggaaatgagtttttagttaatcaaatcgtgccagtaatcaaaaaagacttagcctaagccaagtccctcttcatcatcacatgttctacgccgccttcatcaaacggttcgcctacaacttgatagcccaagctatcatagaaaggctttacccgcatttgggcgtgacagtaaactgcatcaatcttattttgccgtaaaaatttatgcacagctgtaatcattttcgatcctagctgttgtccgcgcgcttcttttgacacagcaacgcgtcctagcatccatttaccatcttcttgaaacagacgacaagtcgctaaggcagtcgtctgtttttgattgagtaaataaacctgaacagcaattaggtcctcatcatctaaatctggtagagttatcttctgttcagccacaaaagtcgtgttgcgcaatctttctacgcaatagaattctctagctgtcatttcatcaatctttttaaaagtaaaattatctatcttcatattacttgcctaaccaactattgtttctgccaaaccatttttcattaagtttacgcaattgaccatttttttgcaattttgctaaaccttgattgaccttctgacgcaaagttttgtctcccttacgcatccccacagcgaacaagtccattggcacgcgatcattctgaattaccttgtattcgctacttttagccatgtgagcaatataatagtcggcataaacttcatctaacagaattccttgaattcgtcctgcattcagatccaagaacgaattagaaatcgtatcatataaaactgttttcttagcatgcagcacatcttgtttagtttcataccactgctctgctgttgaaccagtttgcattcctaattcataattcttcatttgtttaaatgaactaatgtcactatcttttttcacaactaaaacctggcgattacgtaaatatggcttgctaaaagctacttttttctgtcgttctggcgtaatgctgtaaccattccagagtaagtctatcgtaccgttacgcagctctgtaacgttcattgaccaatcaatcgtttgaaaagaaaccttaatgccatattgtttaaagactgccttagctaagtcgatgtcataacccgtcaattggccgtttttcttttcaaagcccattggtacaaaactatcgtctaagccaattaccacttgctttttgctggcaatcttattccatgtatcttgagtattagcttctttttgtacgctttggcaaccagttaaacataatgttaaggccaagacgatacctaaaatccattttttcattgcctaatcctcgcttaacggtcgaaccttgagcatctgatccgccacattctctgcaaaattcaagtcgtgggtgataatcagctgggttaaacccgatttttttaagcttaaaatcattttctcaacttccttacgtaaatttggatctagcgcgctagttggctcatcataacaaagaatccgcggtttcatagccaaagctctagcgatagctactcgctgtttctgcccacctgataactcataaggatactgctgttcacggccacttatttgtagacgttttaacaatacacgcgcatcctgctctgcttcagttttactcttttttaataccaaagtaggtgccaaagtgatattttgtaaaacgctcaaattaggaaaaagattataatcttggaaaacaacgccaaccttgcctgaatcataaggtttaccgtcaatcaaaatttcaccagaatcttttgtttccaaaccggcaataattcttagtaaggtggttttccccgctcctgatggacctacaattgtcataatttctccgtctttcaaggtaaaagagatgtcacgcaaaattcggtgaccgttaaattctttgctcaaattttttacttctaacatattctcacctcaactacttgtaataagaaaagtatttttccagctttttcaaaacaaaagcacaaatactgatcaacagtagataaattacacctactaaaactaacggtactagcgttacgtctctggccattgccacattgccggccctaagcaaatcacctaaaccaatgacataaactagcgatgaatcctttaccaagttaattacttcatttccaattgaaggcaaaacaatttttattacctggggaataataatcttggtcatcgtttgccagcggctcaagcgcaaaactttcgctgcttcaaactggccttcatcaatcgattggaagccgccacgaaaaatttccgcaaaataagccgcataattcaaaacaaaagcaaacaaggctgcttgatagcggggaaagacgatatgaataattggtaagccataaaagacaaagatcaattgcaataataagggcgtgccccgcataatccaaacataaaagttaaccaaccagcgtaatggtttaaacttacttttttcacctaatgagaccaaaattcctaatggcgttgctaaaattaacgtccagaaaaaaatacttaacgtcatgcctgctcctgacaaaagagcgggtaaaatttctgcaatatattttaatgacatactctcaccttcatttttctttcctaataaaaaagccctcttaggattaacctaagaggacgactgctcgtgattccacctcatgttcgcacctgctcacgcagaaatgcctcactaggttgatcattttaaaagaaaaaccctcatagccaaacggctacgagggcgaatgtaatcgcggttccacctcatgtttacaaattgctcacgcaacttgcctcaataagttcaataatcaacctttagctataacgggctatcccggattttcctacttttgttcagaagaccaactcacagatgtgattcatactagcaaatatcttatttccaccagcaaagactctctattactttgactagtattactatttctgttctaagttgtttttaatgttgaataaatcttaaatgatctagcaacttttgtcaattatttttcttcataagtatctggatcaacatcaagcaatggactcttttctccagtataaataatatctagcttatacattgcacgagaggtaatagtataaacaagttgagtttcatccaatttatggtaagcagctttagaggcatcccacatgactaccgcatcaaattctagtcccttagccaagtaagaaggcacaactagagtaccatcaactagtcgctgattagcagtcgcaattaaggtcgtgttttcaccttttttagctaattcttcatgcacaaatttagctgcagctaagtctttggtaataacagctgtcgtacgcttattttgttcattattatgcaaaacgttaactaaaacatcaattgcttcatcatcgttttttctgccccaaattataggcttaggacctttacggttaaaggcttcaatcttttcgccttgacgcaaaatttgcttggtgaaattggtcaattccttagttgaacgatatgatttcgttaattgcaccacatcagttttttcaggatcaaataagccagagatctgcttaagtaagctacgactttcatccttagtaaaaatagcctgattcaagtcacccaacattgtaaacttggcccgtgggaaattatacttcaagtaagctaattgaaatggagtataatcttgaatttcgtcaatgaaggcataacgcatctcaaagtcagtcctgcgaccagtgatcatgtcatacaaatataagtaagctgaaacatcattcatggcaatatggtgctgcttaaagttattcttaacttcttccacatgagccaaccaatcattttcatcaatattccacttagatagatcaaccatcttaggtacagctcgcaaaaagctcaggtattgtgctcgcatattcaaaaagtggttgtgcaaaatacgcttatgcacgcccttcaaggctgataatacaatttttctacctaaaaaggcctcttccttagcctcagactcaaattcttgatcaggtcgatcatataactcatttaattcagattggctcattccttcaatagcgtgtgccacccaagccttcttagtttctggcgtaatctttcgattcaacatcttgatcaattcttcacgcgttgcatcaattcggttggccaacttgtaattttcattgaaagaataatagatctccttaattttttccttatcaaagtaaggtttcttcttatcacggaaataaatattcttaaaaataacaccgcgcttattcaagtgctctgcataacgagtcaacaagttaaagaaattaactgaatccttaaacttagaaatattgctgtctgcggtttgatcttcaaactgtctgaataagttttcaacttccatacctggcaaccgtcgcgcaacaaactgccagtaagtcatttgaaccatattttgttcgcccatttcaggcaaaacattcttaatatagtcattaaacaactggttaggactgaacatgattacatcacttgaagtcaggttgccacgataacgataaagcaaaaaggctatccgctgcaaaatcgcactggttttaccagaacctgccgcaccctggacaaaaagcagatctgctttggtgtttcgaataatcttattttgttcgcgttgaatcgtcgttacgattgacttcatctgcgttgatgatttttctgacaaaacttccaagagcatttgatcaccgattgactcatcagtgtcaaacatgttcacaatcttgccatcttcaatcataaattggcgtttcttagtcatatcaactgtaatttcaccttcaggcgaattataagaaactttacccaatttaccatcataataaattgaagatattggtgcccgccagtcatagatcaagaagtgatcgtccttgtctgcaaaagaacctagaccaatataaatcgtctctgttcggtcctcatttttttctttaaaatcaacccgagcaaaatatggtcgcttctctaaacgctctacagtctctagctgcttagctgaatgttgccaagcatgttcacgttcactcaataattgttgctgctggtggattgacagtgctgtttccattgaagtggaataaccatcataatccaatttaacatcgtcaaaaaagtgtgaattaagctctcttgcttcgccttcagctgatttgatagatttttttaaagttttttcgcggtccttgatctgacccataatattatcaaggtgcttttgttcaagttctttttcgtttttttcagttttggctgtagccatctaatcaccttttctttaaaaattcgcataccattttaccatgaatagcgctttcataatagttttcctgctcgtgagaaaaatataaataaaaattgatgaaaactttaactttagagactataatcttgacatattggggtgatatatacatgaaaagattttttaaattactgagaaatgttctcttgcttgctcttatcgctcttggcgtttggacttatcagaacaatcccaatattcgtatcgcaacgcaagactccctagctacacttagctatcgaattaacgaacttctaactaacgaaacgaccatttctcccaataacgaaaaaaagactactaatatcaaaactgacacagataaaacagaaaatgacgattcttcagacaatcgtgtatggtcaaatcctgaagctaaggtttatatcgatattagcaataatgctcaactaagatcagctgcagtcaatgcaatgaacgcttggaatcgtaccggtgcttttacttttcaccaaataaatgataaaaaagacgctcaaatcgtcattaatacagtcgataatagcgacactaatgccgcaggagaaacagcaactacctataaccctgctacaggacatttgttaaaggccacggtcaacttgaaccgttactatttgcaaaacgaatggtatggttacagttacaatcgaatcgttaatactgctgaacacgaattaggccacgcaattggcttaaaccacactaataatgtctcagtcatgtacccaaagggttcgatctatacgattcaaccgcaagatattaaaactgttaaaaagatctaccacgaaaataattaactttaaaagctcacctcttttttctacaataaagtgtgagctttttacgaggagaaaaatatgaaaagaatttatatcgtccgtcacggtcaaacttatatcaatcgctacaataagatgcaaggttggtgtgacacaccattaactacaccaggaattgaaggcgctgaagaagctggtaaagctttaagcgaagtaccttttgacattgcattgtctagtgatcttaagagagcaagtgatacctgtgagatcatcatgaaatataacgccaacaaagacgaattgcagcacatcgctagtccatttttcagagaacaattctacggctacttcgaaggaatggattccgaaatggcttggcgaatgattggtggcagtcacggctacggaacacggcaagaaatgtttgctcatgagagcatcgatactattaaggattggattaaagaagccgatccttatcaccaagcagaaaacgctgaagaatattgggctcgtcttgatgatggttttaaattaatcagtcaattggatggcgctgaaaacattctgctagttactcacggcttcactattagaagtctctggtatcgttatggtgaccatattcctttggttccaggtcctaagaatgcttcaatcactattatgacaatgagtgagaaaggcgaaattaagatacctaagtggaatttaatgcatttatagcaaaataagattaggcgaatcgggcctaatcttattttgtttgtttcccggatttaaaattgaagtgcaacactaagtgttaaacaaaaaggccatgaagacctaaacttgaagtgacgaaaaatcaagaaaggaagatcttcatgaccaattcaaattctagcatttctaagcactatcatcaattaaccagcgtacaacgtggacaaattcaagcaatgctggattccggcataacttcccgtactgttatcgctcaagaagttggctgccataagtcgacaatcagtcgcgaaatcaaacgcggaagcgtcctgcaaagagacagcagctatttattgtatgagcactattacgctgatactgcacagatttattatgagaagcgtcgcaaaaactgctatcagcgcaatccattgaagcattatgctgtctttttgagaatgctctccagacgctttaaagctaaatttgatgccaccagcatcgatgaattcgttggtgaattcaaaaggactatgccaggctacccttgtcccagcacaccaactgtctatcgctatattgatcagggcttgctggacataagcaatattgatctgcctatgaagctcaaaagacgcaggaacaagtgtcatcacggccatagcggtcatgctttgcacaagaagcatcttggcaattccattgaacagcgtcctaaagagattgaagacagaaaaacgccgctgcactgggaaggagatctggttaaaggcgtcagacgcaagaatcagcctgctttaatgactttgaccgaaagaaccacacgctttgaagtagttatcaagattcctgactatcgggcaagcacatgccaaaggctgcttcaaaatgagattgacagacatcctgcctggtttaaatcgatcacgtttgacaatggctctgagtttgcggatatgaccgagatcaaaggctgccagatctacttcgcccacccatattctccatgggaaagaggcaccaatgagaactgcaatggacttctgcgtcaattcttccctaaaggcaaaagcatgaaagataagtcagctgcttatgttcaacaggcaactgatgccattaaccgcaaacatcgtcgaatccttcaatatcacacagcagaagaactcttcaagcaatatatttcctcatagcctaactgttgcacttaatttgacaattcaggattttgtttgtttaattatttttgcaaaacaatatttttatatagcttcactgttattaaaaaacttcctgaaactgtcaaatcttttgtgtaaatagttctttctcgtaaattgattttttaattatttatttaatcaaagtaggattctaaggtgtcctgaacctgaccaaagcctttatgaattcgattgaaataacggtcattgtagctcattgcctgaataccaataaaagcatcaagcgactgttcagttggaaactctgccttaggcttagctttgcgcttgatcacattgttaaatgattcaatcatgttagtcgaataaattgaagctctgatctgcttgggatagttataaaagaccagcagatctggttctatgtctttcaagcttctgataacatggctgtaaaccttgccccatttggtatagaagtcatgcaggacagctgtggcttcttctttgtttgtctgttgatgcacctgtttgaattcgttcatgatcttttcacgatcgtcgacgcgtactttagcgcagatattgcgcatgacatgaaccaaacagcgttgaaaatgagctttaggataagtcctggccaaggctgttttcatgccaacaacaccatcagaaagaaagagttcaacttgcttcaagcctctggacttcatgttttgaagcatctctgtccagacttcaatgttctcactaggagcaatgcagtagtcaatgacttccttatgtccattaggtttaatgccaatggcaatatagactgcttcacgctcaacgctcaaacgtttctcggcgcaaaggaaggtatgtcgcatccaaatagacgcagaaaaacttgtcgcttagcttgcgtttgtggtaagcctcaacctttggaatcatctgcttggaaatatttgatacctgagctggactgtaatggctgccatacatcttttcaattagatcggctatttccctggtggtcacgcccttggagtaaagcttgataatcatgctttccaagatatccgagtgctgcttgtagtcaggcagcgtgtgctgatgaaattgaccgttgcgatcccgaggcacttgcacttcaattgggccaaattgcgtatcaactttgcggaaataagcaccatttctagagttgccagtattccagccatttctggcatagggatcatagcccagaaaggcagtcaattcagcttctagcaagttattaacagcctgttgtagttctttgcgcaataaatcatttattttgtctggattgaatagagcttgagcaaaatctttggtaaaatcattcatgaaggagttcttctttctgtatgtgtttttttgttcaaaccaatcatacgagaaaggaactcctttttctaatgtttaaagaaataaatttaaggaatcattcatccttacacaaactattttacagtctcaacttcctactatttttaacagtaggaagtcttactctaactaatctttagtcacttgttttagtttttattaacttacagtcgcccaaagtctgaatcaattgtttgccatctttttggtggaaaacagcgttttgatacgacaatcgttctttctttttactcttatctttatactttttaataaaggttacttcatagttaatccgactataattacgcttacctggtaaaacagagagcaccttgatctttacacttaatttcttgatactcttctttttatgccattcctttagttgcttagcaatcttcttatagtctgcattttcttttccattttcaaagtcatctgcatttggcgacttaagggtgttgtacaatagcttagctgcatccccaaccttaatcaagccaggccaaatcgggttaacaatatagtcaccttctgcatcctgatagacatctttttcgccattgccttgatattcagcagtaccatcataatcagtgacgtcatcctcactattagaaaattctgaactaatcgactgcgacaaatccgttaccctttcggacttaatagtttgaccatctgccttactcttaatatagatttccattcgcttagcaatcggataatccttgaaagtatagctaccatgctggttcaatttacccgccttacgatcattgatatagatcgtaccattaggaacgctgcgcacttggaaagtggccgttttgatcttcatatcaacagtcttatctgaccaaatgttaacaatcgaatcagcatctaaatggcgaccattaaccttagatttaactaatatatgatagcgaccaggaaagaccatacctaaatcttgatagtaattctgattgccaccttccatttcaccataatccttttggttaaccgtcaaagttgaattagcgtgattggtcttcacctgtgggcgatatacttgtatccacaacttatattttggaaaaagcaaaaaattgcgtccatcttgaatcagtctgatttcaccatgatcgcgattatgacgcaaattataggctaaacgtttagctgcactgtgatgctctttaaagtaattttgaagcggcttcagcgatttatctgtcacatccatatcaggcgttgaagccgtgacatactgagctagctcagttttaggatcctgcattttagctacaatgcggtcaatttgacgttctttagtgtaataaaaattgccaattagccatgcaataccaattaacaggataataactcccgatatccaaattttcttatgttttttcattgatcaaaacaccttttcacaaatccttttaacttagattaacaagttgatcaaaaaaagcaaacatcttttgttcacaaatcaagacgaagttcttattatatttagtagcattattttattttggaggggattgcacagtggaagtaaattttgattttgtaaaaaatagcagcttcaaggaagcctttcctaccgctgaaaaaatccacaaattatacacaattgatgattatcgtgacgttatttcaaattcacgtcttctattagagagtctaatcaaaaaaatttttaagttagaaaatctcagtccatattacacagttcatgatggcgaacaccgtaatttgcgtaataatacacattatttacgcaatgaactagattaccctctttcgatcatggatttatttgacgaaatacgctgcatgggcaacgctgctgtccacgataaccaaattgaaccagatcaaaagcaagcctggcactgtatttgtgatttacacgatattcttgtctttttaattaacagctatgacggtcaagacctatattatttgcgtcccgatattgcgatggaagcacaaactgatgaagaccattattatgtgcgccaaaataagcaaccaaaaataatgaaattgcatgatcatcaaaatactaagaaaaaacagtccgcatctgcaccaaaaaaggcgaaacatgttaaacatttttccagtaaacagcatatagagcaaactaactctgagtcacaaacgaaaactactccttccactaaagacaattggttaagaaaaattaaagaactctttcaccatgattagtcatattgacactatgtcacaatatgataaactatatattatataatttacataccgagaagcgcctatgacgctgccgatacgcaaatgaaaactgaacaagtttctcaaatggggaacggcttatgctagtaggtcgttttccattatttttttacgaaaggagtggttagtccgctatggataatcacaggcaaaaaccttgggctgtcgaacagtctgaggtattaacaaatacaaaaacaaccgaaactggtttaactgaagacgaagttcgaatacgccagcaagctggtttaaacgagctcgcagctaaacctcttaaaacagtaatccaaatggtcaaagagcagatttttgatccaatgatcggtatcttattagtagctgccctcttatctgctatgtttggcgaatataccgaagccattattatcgcgacaatcgtggttcttaataccattattggagtagttcaggaaaagaaggcacagtcttctttagctgcgttatgtgacatatctgcgccaactgcccatgtaattcgtaatggcaaagaattaatcataccggccaaggaattagtagttggtgatattgttaccttgcatgatggggacatggttccagccgattttcgcttaattgaaacagctaacttgaaaattcaagaagcatcccttactggtgaatcagtaccggtagaaaaagacgcagctgctgttttaaattcagattgtgctcttggtgaccgcatcaatatggctttttcttcctcaattgtgacttatggtcgtggtcaaggcgtcgtgacagcaattgggatgcaaacagaaatgggtgccattgctggcatgttagaagatcaaactgaagtacaaacaccattgaaacgcaaattagctaaagccggcatggtcttaacgactatcggcttaattatttgtagtttggtctttgcaattggtgctttctatggccgtccacttttaccacaattcttggttgctatctcattggcaatttcaattattccagaaggtctgccagcaaccgcgacaattgttatggccttaggcgttaaacgcatggttaagcgtaacgctttgatcaaaaagctgccagcagtcgaaaccttaggtaacgccactgtcatctgttccgacaaaactggtactttaaccttaaacaaaatgactgttacacaggcagcaacgaatgacttcagccaaagtcacgtagttgaccagcttgcagcaaacaaaaccaatcaaactttggcctatgctagcgctctttgtaacgatgccagcttgaacggtgaaaaagagattggtgatccaactgaggtagccttaattccttttgcccaaaagcttggctttaaccaatctaacttaaagaaagaattcccccgtttgttcgaacaaccctttgattcggacagaaaacggatgacaacattgcacaaaattgacggtcaattaacggtcttcactaagggtgcaacggacgaaatgttgccgttatgtacacacattatgactgacaatggcgtgcgtaaaattacaccccaagacaaaaagcaaattgcccacttgtctcaccaaatgcaagctgacgctttacgagtactaggctttgctaccaaaatagtggataacttacctgaagcaaatgctgatttggaaaataatttgacttttatcgggattgtcggcatgattgacccaccacgaaaagaagttgcagcatcagttaaaacctgccgtgaagccggtattcgcacaattatgattaccggtgaccacaaggtaactgccttggcaattgcgaaaaagttaaacatttatcagacaggtgacttagcaatctcgggaactgaattagaccaaatgtctgatgcagaattagatcaagctgttgaaaaggctaccgtttttgctcgcgtttctcctgctgacaaactgcgcatcattcaaagcttaaagcgaaattgtgaggtaacagctatgaccggtgacggagtaaacgattcacctgccttaaaggctgccgatatcggtgtcgctatgggtgtaacgggtacagacgtggctaaggacgtggctgatatgattttgcttgatgatagttttaccacaattgcgcacgctatcaaggaaggtcgccgcgtttaccgcaacatccaaaaagtaattcagttcttgctagttggtaacattgctgaaattaccactttgtttgcggcaactatttttaactgggatgcgccattattggcagtacacatcttgtgggttaacttagctacagctactctacctgcccttgctcttggcgtagacccagcaagtaaaaacattatgaaacacaagccagttaaagctggtactttattcgaaaaagacctagttattcgggttattacccaaggaatatttgttgccctgcttactttaactggttacttcattggtaaagaaaccggcaatcaagttgtcggacaaaccatggccttcagtattttagcattggcccaaatgattcgttcatttaaccagcattcaaatactgatcccatctggaaaagatcatctggtaataatccatggttaacagtgtcattcattatctctgcatttttcatgggtattattctctttgtcccagcaatgcaagatgcatttcacattaccagtttgtcagctggacaatggttaatcgtagttaccctagctttactttcaattgcacaagttgagttagtaaaaggttgggcaaagtttagaaatatttttattaatgacaataatttaattgaagattaattagttacaaaaagacggtagtacaacactatcgtcttttttgatattaaactttggctgctgccaattggtcaacatctatctgactacgaccaatctgaattgccttttcggtactttcattcaagctagcattgatcatcttatggctaagctccagcaccattggcaaattaacaccgctaattacccgtactcgctcaggatacatatcttcatattccgaagcgactaagtggggtgtcccattttttaaatcagttagcaccaaaatctgactattctgatatttattcatgactttagcaaaacgagccttaaaatctctgattcctgtgtcgtttaattcaattgtcaggatctgatcattcttgcctgccaacatatcatgtgcagacattagccccgcagccaacccttcatgagttgcaattaaaagttccataaaacgcacctctttgtaagcgatttctatagaaccattttaacatatttttgtattaattaagctgttcaatatctgctaataagctactttgttcaggtgttagccgctcatccttttgccgtaacttaagtacttgtagacaagtgtgcaaaatcttttttccttgttccgtcacttgtttgccatccatatcaggcgttacactggctaaaaagtcatccatctcatcagcagtaaccttgaaaacatcattttctccatgaatcaagggcatccgattgagcatttcttcaatcatttgtaatttatttctagcttcttcaaaatctatcttgttcacatccaattctttttcttttattatacaaaaaaacagccacctaagtgactgtcatctttatttcgtattaataattgcgtttgaaattgtagttgcattagattcgatcagttgatgtgaattattaataaaaagggaagccccaattcctatagcagcaaatacaagccaaactttctgtaaaactgtactcttcatgttcccagctccttatatttcttattatataaaaagccgatcgttatggggatggctacgcttacaattaacataattgtaatattatttacctttacttaagagttacttctccagcaacatttgtatcaaaaaagtcagcaatttgatggacgtccatcccttgccctaaagcccacattaatttggtaatcgcactctcagaagtcatatcacaagcagaaatagctccttccagtaaagcctcacgccccacctcatatttggtcaaatcgctacgttcatacaagcattgactgctggctacaacgggaataccttgacgaattagcataccaattgcggctaccatgttgcggcgaataaagttcatcccgcctagaccatatgcttcaataacaattccacggcaaccactattaaccatcgcaaaaagcagattaggatcaaagcctggaaatagtttcaccaacgatacgtgtgaattaattttggtattcaaggttggctgaccgtcatgttctctttgaaaatgttctgaattaaaaactaatccatcggaagaaacggttgctactggtggcacattcacactttcaaaagcatcaaagttggtagtccgcacctttacactgcggcagcccagcataactttattatgaaaggctaaataaacatcaggtggacaagttgctgcagctgcaaaagccaaccgtaggttatcgtgagcgtcacttaggaccacgttaattggtacctgacttcccgtcagcacaaccgggatattaatatttttcagcataaacgacaacattgatgccgtataagccatagtatcagtaccgtgtgaaacaacaattccatcgtaatcattgcggtatttgtagatattttctgcaataaatttccattcttctggttggatattagaagaatctaattgcaaaatatcgcggacttgaatgtcgtacggcaactttcccaacattttaattaactcttcaccggtttccttgggtactaggcctgcatcagaagcaacggaagcaatagttcccccagttgatagcaataatattttcttcatcttgttcccctttatctcaaatcacaatgtcgaccataactattcatgattagatcaattaaaacataggccgaactaaaagttaccgcattttgcttactaaattgaaatggcgtagttttgaagaaaaagctatagtcgctaagagaggctaattttcccgtttgccagctagtcagtgacaccaatttcagttcagtattcacgacatcaatcttcttaagttcttcaataattgttttattaaaaccaccaaatgaaataacaaacagcatgtcattttcccgtgcagaccgccctaataatgccacttcgtcgcgtgcactaggcaaaataattgcttttttaccaattaagaaaaagttatgcgccaaatattccgcgataatttgctgctgccagccagtagagtaaagatagatcgtttccgcttgatctaaatccgcaaaaaatggttgtaagtttaatcccttaaaatatttaaaagtttcagcaatgatcttttgtaaatccgtattgaaatctagcgtttgcttgttcttaacgttttgctcctttcgtgtagctaactcggacaattcaaatttcaattcgctgaaaccgcttaatcccaattttttgcttaggcgaaaaatagcggacttagaaacgtataatttctgagctaattccagcaaactcaactgacttgctacttcaggatatttcaataaatagctaacgatcgctttatcggtctcattaaaactttcctttttcttcatgaccgctgtttctaaatccattctgtttcctttctcatcactgtttcttattaagaaaagaatatcatgtcgtactcaaaaaaggtagccaccctatttgagtaactaccttaatttttattcttgaattgaagttatgttatgacaattaattatttaagttctggccagtatggagcattaactggaatcatgtcatccaaaatcttcttagcaacggaagcatctggtacagtcttgtttaatgcaaatgcttgcagcatcttattgtatgaatgttcaacataagcatcaacaaccaatttttcacaagtttgttgttccatcatcaagcctctttggaagcgacctgctttacccgtagccattggttgaatgccatcagcaccaaacaatgctggtacttcaacaattgaatctggatccatattagaaattgcaccgttattagcacagttagctaagaacttttcatgagtgttaaatgcgatcgcatgacaaatatctacgatatattcagagtgcaaacctgaaatatcccaaatattattcttagcagttcccacctttacgattctttcacattcgccaaagacaatcttttgccggtgttcacgaatttcatcagtacgagtatgcttcggatcagcattagcaacttcatattgtgggaagtagtagtattgcatgtaattgtttggcaaagtttctggctctagcttatattcatcggcaactttcttaaaggtggcttcccaagaagcttcagtatccttgtcgtaatcgccacctacccaatagccgtgctctttgacatattccttcaacttaggcattaagtcttcgccagtcttcttgttgcgaacttctttccaccagccaaaatgattcaaaccataatagttaaagtcaatatcatgccaactgtccaaaccacaaatggcagccattctgtccatatcatcaatcggcatatcacaaatgttaattaccttagcatttggacgaagacgacggcaagcttctgcaacgattgcaattgtgttggagtagttgatcatccaagcatttggtgagtattcttccatccaatcaataatttgcaaaattgcgggaattgagcgaagaccataggccattcctccgggtccagtagtttcttgaccattcacgccatattttaatggaatcttttcatccaagcttctcatgtgatatttaccaacacgaattgatcccataacaaaatctacatcagtaaaggcctctttaggatcagttgtgtaagaaaacttaatttgaggtgctctttccttcatgataatttcaacagctttggcaatcttttcttgccgttcagcatcgttatcatagaacttcaactgtcttaatgggaatttatcctgactcttgattaaatcaaggacaaatcctggagtaaaagtactaccaccgccagcaataactactgaatatttcttaccatccataatctattttctcctttaaataaaactaagtttttatctctgtttcatttgccttacgcatatatttatatcatcttctcccacaaatgtattcgttttcaccagcttcagactttgtttcaagttttggaacgcgtttcactacgcgaaatatttttaaattttgccttaagcctaacaaatcaggtgtttaacttgcctttattagtaatagtgtaaaaatgaaaaaaataatcgtttcatgaccaagataaactataatttgaacattcctttaaccacaaaaataaatagtccgtatttgatgatcgtatagttttaatgaaactgtcaaatcttttgtgtaaacagatctttctcgtaaattgattttttaattatttatttaatcaaagtaggattctaaggtgtcctgaacctgaccaaagcctttatgaattcgattgaaataacggtcattgtagctcattgcctgaataccaataaaagcatcaagcgactgttcagttggaaactctgccttaggcttagctttgcgcttgatcacattgttaaatgattcaatcatgttagtcgaataaattgaagctctgatctgcttgggatagttataaaagaccagcagatctggttctatgtctttcaagcttctgataacatggctgtaaaccttgccccatttggtatagaagtcatgcaggacagctgtggcttcttctttgtttgtctgttgatgcacctgtttgaattcgttcatgatcttttcacgatcgtcgacgcgtactttagcgcagatattgcgcatgacatgaaccaaacagcgttgaaaatgagcttttggataagtctgagctaaggctgttttcatgccaacaacaccatcagaaagaaaaagctcaacttgctttaagcctcgggatttcatgttttgaagcatatctgtccagacttcaatgttctcgctaggcgcaatgcagtagtcaatgacctccttgtgcccattaggcttgatgccaatggcaatatagactgcttcacgctcaaatgtttctcggcgcaaaggaaggtatgtcgcatccaaatagacgcagaaaaacttgtcgcttagcttgcgtttgtggtaagcctcaacctttggaatcatctgcttggaaatatttgatacctgagctggactgtaatggctgccatacatcttttcaattagatcggctatttccctggtggtcacgcccttggagtaaagcttgataatcatgctttccaagatatccgagtgctgcttgtagtcaggcagcgtgtgctgatgaaattgaccgttgcgatcccgaggcacttgcacttcaattgggccaaattgcgtatcaactttgcggaaataagcaccatttctagagttgccagtattccagccatttctggcatagggatcatagcccagaaaggcagtcaattcagcttctagcaagttattaacagcctgttgtagttctttgcgcaataaatcatttattttgtctggattgaatagagcttgagcaaaatctttggtaaaatcattcatgaaggagttcttctttctgtatgtgttttttttgttcaaaccaatcatacgagaaaggaactcctttttctaatgtttaaagaaataaatttaaggaatcattcatccttacacaaactattttacagtctcttaaataatcattaattatagactttcttatatcagttgctgtatttcctggtctatcttgtaaataaaaagcgagggctttatcataatatgatactttcttcgctctagacaacgcaaccaaatataacaaaaaatccgtataactcacgtgtttagggaaactaacattttttagcaattgggttttataaagttttgcatgcggtgaaacttgaaaaaaagaaacatactaacctagtgttggatcatgaatcgacggattcacgatctggcactttttattttgtctaaaatagaaagtgaagataaagcaaatcaagtcttcagctttttagacacttgatgtcgtaaaagaaacggactgctttaccacctattcttaagtctcttcgaagtctgtgggcacttagatgccgtgtttagaaaattagaattaataggttgataaagaggtttatcttcacagcggaggttatattatggaatcacaaattattttcggtattgatgttagcagtaaatcttccacagtttgtgtggttaatgaccggatcaaacaaggcgaatcttttagaatctctaatgattcctttggctatcaaaaactttatgagcaactgaaccaatatttgataactcctttagttgttttcgaagctactggtgtttattctctaagcctgcaagctttcttagaggattatcatattaagtatttgaagcttaatccgcttaaagcgaaaaagctaatggacaataatttacgccataataaaactgataaggtagatgcttatcgcctggctttaattcaatttaatgccccgcaaaagctgcgtgatccacagcccagagagtatcatgaacttcagaatgccagtcgctattatgaagaacttactaggagtatagttactactaaaaatcaattgcaccgcaacctccaatccactttcccacaaattgaagaaatactgtctcatccatctggcagaatttattgggcgcttgttagtcttttcccacatgctggatatgttctagaaaagaatgagacacaggtaactcaaatgcttaattctatttctggaataggacaacaaagggcacggtacttaaccacaagattatacgcttttgctagagaagcttatccttatgattccaaagatagtattatcgttagagctattcaaaggaacatttctaatttattttcactccagcaagaacgcgactatgtaattaactacatggaaaagctggctaaagcagtaaacgctcgtgctttatccatctatttgagtatcccaggggttgctagaattacagcagtgagattagtagcagagcttggtgatctaagacggtttagcacttcagctcaaattgatgcgtttgttggcattgatccaggaaggtaccaatctggtgaaaaagacagttctcttggcattaccaagcatggcaatcatattgccagaaaaatactttatcgagttattactcaaatggagacggtaaaggctacgcagccttgccatataactgattattatgacaagaaaaaacgatcttcaaatagacaaggctataagaaaatcgccattgcatcagtccataaactgatacgcacaatgtttgctcttatcaaacatgatcaattatatgattacaacatagccaccgaaaataaaagactttagctgaaatcaaataatcaacttaagtataagcaacctatggaaaaactacaagtattcataggcttatttgtggtactttcgctttttcttaaatttaaactcttatttgctttaaccttattcgcatcattaaaacaagtaaatttattttcttaaatcattgataatacttgactttgggtagaaaaacagctgtatatcctgtgtttctgaatatacttttttaggttcaatactttctaaatatcctggtttcacagaacatttatgagcacttccatcatcagcatacacatcaaatcgatcccctactacaatatcagtgtcattatttttggcaaatgtataaagtacttctaaacaatcttcttccaaccaatcatcaggatcacacaccaaaaagtaatcagaattaatactatttatagctaactctaacgctgaaccatagccaccattttctttatcaattactttaattctattatctttcgcagcacattctttcgcatacttactagaattatctggcgatccatcattaatagccaaaacttcaaaattactgtatgtctgattttctaatgactcaaaacatttttttacgtatttttcaacattatacattggaacaattacggttatgtctgatttcattattttattaccccaaataaattttcttcaacttttcagcagtatttctaatatcgtatccttgtttttttaaaaaatttgtattttctgctcgatcatacttcctggatagtaactttaaactttgcttataccactctttaagcgataaatttaagtcaagaaacatcacgttatcagtaaccttaatatctagaggaacattagtggaagctaataccggaagcccagcatcctgagcctcaatacttgcaattcctagtccttcatattcagaaggaaaaataaataaatccattgcttgtagataatcttcaacattatctacatttcctattaattgaacatatttctctaatcgattttgcttaatactcattcgtattgatttttcctgtggaccagctcctataagtaacagcttagccttagtattatttttaataaaataacttaataattttattaaaaatatttgatttttctcaggtgatagccttccaacatgcccaattagtatttcatgatctgaaatattcaatttgttacgataatgttctctagtcccaatattatatgcatactgctgtatgttaattccatttttcaaaattcttccttttttgttaaaaattttttttgaaaattgccaatatgcagctttttttgttggagcaaccaaaacgtcagcatatttactaaagattggtgcataaatctttttaattacttcatgctttacatttttattttttcctgacatgtgcgaatgcacaataacttttttcacacctgcttttttagcatacaaggtaaataatgcaagtatagatatacttccactatttatatgcacaacatcatattgattatctagcagaatttttttatatgcatttacaacattaaatctattctttccaacattaaaaggtaaattaaaagagtatagcgtagaatttagtgatttaataaagctaatatagtcgggattatcagcataatatggtgttaaaaaatcgaattttagaccttttttgttcatattttcaattgttctaaatacaaaagcctcttgcccgccatacaaaattggctcaccaaacgcctctaaaatctttttcatactatccaactttctacatttttattttatatactctatagacggattaaaacgtaatccctcaattgttcctttaaatatcatctttaaccttttacgtttattatttttagctttgaacaaaacccttatcatgtgatcatttaaacgtaaaaattcatatccatatccttttagcccttcctttctataaaagaaaaaatcattcctatacaaatatccaatgtcattaagttaagacattgacaaattgaatctaatctctgtagaaccgaatcattatgatttggttctttttttgcataaaataaaggcgaaaagaacctaccttttcgccctctgattaaattattaaaccttcaaaattattgccagaaagctggtgttaattatgaaagcccttcacagaaatattttagatcgtcttgatcaaattatcaatgatactggaaagcatattcatgattttatcgatgatcctcatgccttcactaggaagcggtttttagatgcagctacagtcattaaaactactattaatatgcaaggaaaagatttgaccagtgagttgtttagagcttttggccaaaaagctattaaaaataacgataaagtagtcagtacttccgcttatgtccaacgcaaaggtcagctttcacccgcatgttttaagcatattctaactgtatttaatcagaatttatttaatatccagttatttgatcataaatatcgtatatttgccattgatgggtctgattttaatcaaatctggaatcctaaatcagagaatatcgttggaaatctcaatcataaaggaaagccatattgccaaattcatgttaatgcactctatgacctgttaaataatacttatcaagactgcatctttcagcctaagtcaaagatggatgaacgtaaagccgccgttcaaatgcttaaaaagctaaattgcggaccatatatagttactatggatcgaggttataccggctttaacatgattgaaaattgtaatcgcctgcctaactgttattatgtcatacgtactaaaacgggatatggcgcatttaaggaagtagctgagttgcctaatcaagagtgtgataaggatatagcttgctgggtgactacctctaattattattatgaaacccataaggctacagaaaacgttcatttggttaaccatcattaccgtcaatatataaaatatcggtctaaaaataccaaagatggcagctgggactttggagagttatgtacaataaaatttcgtgcctgtaaatttagaattaatgatcctaaatcaggcaaagaagaatgggaagttgttctaactaatctaaatagagccgattatcccttaaaaaggatcaaagaaatctaccatttgcgctggggcattgaaacttcattcaaaaagttgaaatatgctttaggtagcgtacagtttcattccaagcaggatagatttattgaaatggagatctatgcccacatgattatgtttaacgcagtcagtcaaattgatgctcaagcatatgtaccacaaaaaaaatgcaagtatcaatatgcgatcaatttcaaacagtcatgttttgtcatccaggctatgtatataatttcttcttcaactgaaatctttaaaaagattcttattcaaattagtcattacacaattccgatcagaccaggacgaaaagacaaaagaaatctcaaacccaaatcagctgtatattatttatatcgtgtagcctaatttctaaacaagatttgggtttatttggcatgaaaaaagagcattcaaatgcgataaatcgcaaatgaatgatcttaaaagtccaagtcgataatttgtcaatgtcttaacttaatgacattgtacaaatatctatatctttctattctttctgggacatctgttgcaatgtttgcaccaacattagtttttgttttatgtacaacaatactattagttacaacataacattcatattttgaggaaattcgtcttgtatattcccaatcatcagtccaaataaagaattccttaattggtaaccctacttttttgataactgaaactggaacaaataaggaaacaaaagaagctaaagtaacaggtatcaattcagatgaaaaatcagacacattttttgttaatgtccttctctgaatattcatcgtacacaaggtattatcggtccacaaagttttactagacaaaaaaccataatcatgatttagttttatatctgccttaagaaactcattcaaagcatttttagttggtatgcaatcatcatccataatccaaacaaaatcataatccttttgagctaccatctttataccatactgaaatccaccagcaccaccaagatttttccccgtattaacatagtttatactgttatcatcaatatattttgcaatataattaactgtaccatctgtactattattatcaataatatatatatctggctttgcggtttgttccaataagcttttaatacattcttttagtaacttttttctattatatgttactacaatagcggcaacttgctgtttcctcataaactttaattctcctttttattcataaagctaactacagaaataaaacttaataaaaatggtactattagaaatctaaatggatcatacatattttgtgacattatactagttaatgcagtagtgcaagttagtaaaaacaaaaacttattttgaacaaatttgactttttttaagcttacatataatcccattacaaatggcgatataaaaatagcaaaacctattattccatattgaaataacatagataatatacctaaatctgattggtttaccatatgtgtatccaatatattaaaataattcccatcgtttgatataccatatccccaccatacacctctttctatccaaagagtttgatatgtatttaatgtcatcattcttatttgagtactagatccatagtctgcatttgaagttgaaaaagtattaaccaatttatttaagtaatttcctctaaaaataattggactaatggctatagctcctaccacatctagagctttacttttaaaagtatcactaacgataagtatgaataccactaaacttaataaataggctatttgttgtgaacgtgagtcatacacaatatatgcatataaaaagcataatactataactgagatattacgtgttttaattacaacacttttttctttgatgattttgaaaagagccataacccatacgtaattatctaaaaaagtacctggtaatctacttactccatttctcgcccaagcaaatcccattacttcaaaataacctggagctacattcatacgtaatttattgtacaaaaaccacgcgctaaatctaaatattaatatagcaacccccatataatatatattattaacgcgtggtgctagttaataaaaaagtccaatcggattagactcaagttgtaacttaaattaaatagaaaagagtccgatctaattgaactatctcaagcttaatcgtttttctcaccatttacaagttagctttgctcggttaaatgtaatttgtcgttctttgtacaagctttgtgctcctgatgaattgaagcaccgtaaaaatgttgatcaggttaaaatttctgacagctccatcttagcgatgcttatttggcaaactgaaattggtatcgaatctcaaagaagattttgtaaattctttgtcggtttgtctcattctcgctttaatcgtcgggcacgaatgcttttgcctttaatgcgctgtatccgtcaagattggaatcaagaagtaaaaacagctggagaattcttaattattgacagtttcccagtttgtcagcctatccgcaactatcgcgtcaagatctttcgtggcatagctgatatcggctagaaagccactaaaaaaatctattattacggcttcaaggttcacgcgctagtaagcgatgatggctatgtacttgaactaaagcatcagtgcatgatgccaaagaaacgacagaattgatgattaatgctcatccaattaaccattatcttttaggcgatgaaggctacttaggaaaagacttaactgccgagttaaaaggtatgggctatgtcctttggacaccatatcgaagaaacatgaaaggcgctaaaaagcataacgatcatcaactgatggcaattagaagaacaattgagagcgacttttctttgcttagctggttttcagcagcggctagaaatagccattttagcttataatatggcatattgcctagaacgatttaactagcaccacgcgtattattaataaatttcattcttcgtttagcagtcgctagcacctccgtcatcggaaacgttaacaacatatacgcataatatctattatgaattaaagcatctttaattgtgtacccagataaggaaaaactatttagcctatataactgtagcccaaacataaaaataaaaacgcctatataaatagatacatatctgagactgtaaaatagtttgtgtaaggatgaatgattccttaaatttatttctttaaacattagaaaaaggagttcctttctcgtatgattggtttgaacaaaaaaaacacatacagaaagaagaactccttcatgaatgattttaccaaagattttgctcaagctctattcaatccagacaaaataaatgatttattgcgcaaagaactacaacaggctgttaataacttgctagaagctgaattgactgcctttctgggctatgatccctatgccagaaatggctggaatactggcaactctagaaatggtgcttatttccgcaaagttgatacgcaatttggcccaattgaagtgcaagtgcctcgggatcgcaacggtcaatttcatcagcacacgctgcctgactacaagcagcactcggatatcttggaaagcatgattatcaagctttactccaagggcgtgaccaccagggaaatagccgatctaattgaaaagatgtatggcagccattacagtccagctcaggtatcaaatatttccaagcagatgattccaaaggttgaggcttaccacaaacgcaagctaagcgacaagtttttctgcgtctatttggatgcgacataccttcctttgcgccgagaaacgtttgagcgtgaagcagtctatattgccattggcattaaacctaatggacataaggaagtcattgactactgcattgctcctagtgagaacattgaagtctggacagagatgcttcaaaacatgaagtccagaggcttgaagcaagttgaactctttctttctgatggtgttgttggcatgaaaacagccttggccaggacttatcctaaagctcattttcaacgctgtttggttcatgtcatgcgcaatatctgcgctaaagtacgcgtcgacgatcgtgaaaagatcatgaacgaattcaaacaggtgcatcaacagacaaacaaagaagaagccacagctgtcctgcatgacttctataccaaatggggcaaggtttacagccatgttatcagaagcttgaaagacatagaaccagatctgctggtcttttataactatcccaagcagatcagagcttcaatttattcgactaacatgattgaatcatttaacaatgtgatcaagcgcaaagctaagcctaaggcagagtttccaactgaacagtcgcttgatgcttttattggtattcaggcaatgagctacaatgaccgttatttcaatcgaattcataaaggctttggtcaggttcaggacaccttagaatcctactttgattaaataaataattaaaaaatcaatttacgagaaagaactatttacacaaaagatttgacagtttcacatatcttgaaacttttatttctctatttttttgatttacataaataaaatacagtaaaacagatataacaacacctatactaatacttaaagaatttaagtctttaaaaaagttgataaaacctaaatataaaaaaactataaggtaaattgaatattcatacagttttactgttttccatctcatattttttctcataccaaattaaaaatgtgttttcgtttttatacctatttttcgtttaattaaagaaaagcctttctttaaagtattctttccaccaatttgtccccaaggaacttctacataagtaaatgaattggtaccaagccaaacatccattaacaactcagaaatatatccaaatactctcgcttcttgcacagaatattcagaaatattaatgctattttctagcttacttagaacatcaaacatgaagctacaatatgattcaaatgcattccttttcataataaacatattaaacatatgagccccacgctttttcataactttatcaaaagcaggaagataatttggatatacttcagcaattacctttcttgcttcatccaaaggctctttatgatgtgcatgaatgtaatgtgaataattagtttcaatataataatttctttttttaggtaaaattacatcatatttttgtaaaagctgatttactttctcaatactaattacattatctaaagaatatggtcttttctcaaagagtaatcttctatagtgaactaatccaatagcgtcaacatcttttaaattcttccaagcccaataaacagcagttagttcattgtaattaggatttttagaggatatattttcaccatcatcatcacgctgataggaaatacctggtttataattctttactgcgcctactaatactggtaaatatccttcctttttgggcataggaaactctttatgcgcagcaaccaaaatttctattttcaaagactcttctcctgatcaatacgctccattaggatgaataaccaccccaattgtcttaacaatcaacttcaaatcttcccacaaaccggaatggttgatatacacaatatcaagccaaaccatttcgtcaaagtcagcttcactacggcgtgttacctgccacaagccagtacaacctggcataacgagcaaacgttgcttatcgtagtcagtatactcagctacttcagagggtagagggggccgtggaccgactagtgacatatcgccgatcaagacattccacagttgtggcaattcatcaagactatacttgcgaattgtatgtccgatcttcgtaattcttggatcgtccttgatcttgaacattgcgccgtcaatttcgttctgatcttctagttcatcaagcatttgatcagcgttaacgaccattgaacggaacttccacatcttgaacggcttctcatctttaccgattcgttcttgagaataaaatgcaggaccaccatcttcatgtcttatttttattatcaaaaataaaaataacggagatagtaaaattaacccaagtgcgctagctagtatatcaaatatccccttaatcgtgtgatacactggtcgtccgttaacttttgcaggattaacttgtagtttatcatactcctcttaccctctgtttgatttagtctatttgaatacactctcttattaatcttatcacgtttaacgcaacttagaagcaaacttgcatatttgcaccaagcattaaaataaccagaactttttcttctgcttcaatgggtgccaatccatctgaactgggtcgccattgatgatacttctagcattatcttgccactgctgagctagatcttgactgaattcttgactcatctttttataagcttcactcaattgatactgccgtcttggcaagtcgtgtgcgtcgctagcaaaggtgcatccctgccccgtcgcaatcaacttacgcgacatctcttcgattttcttgccaaagattcctgtataagagctagcagtaatttgcaccaagcagccttgttccagcatcccttgcaaaatttccggttccttcaagatgcgactattgcgctctgggtgtacgataatcggcgtcaccccgcgctgcatgatcttgaagatcgtgtcttgcgcataagttggcacgtcctcacttggaaattccaacagcatataagtaccgtcttcatcgcagaacaggatatcatcgttatcaagcgcatcaattaagtcacccgacaagcgaacttcctgccctgggaaaaccgtcaacggcaccttggcctcatctagcttctgttggtagagatcagtcagccagacgatatcatccttatggttagtgtaacgaccattcagtgtatgcggcgtacaaattgcatgcgttacgccatctttgaccgcagccttggctaacttaattgaagtgtcccaattttttgagccatcatcaatgccaggcaagatgtggcagtgaatatcgactaaaaccattattgatcgtcactcttttttctaccgaacaggccctttttcttctcagcgccatatccataaccatagccatacccgtagccgtaaccatagccaccgttttcagctctaatgtcgttcatgacgtagcctagaatccgagctttggcaaattttaacatttgcactgctctagtaatcccagccttttgcgtaacgccttgacgtactactaagactacgccgtcaaggtgactagccaactcttgcgtatcggatacttcaagaacaggagctaagtcaatgataaccatatcataatgtgacttaaccaattcaatgaaggtttccattctgcgtgaaccaatcaattcagctgggtttggtggaatcggaccagaagtcaagattgacaagttatcaattccactttcttcaaccacatcatttaaattgattgcgtcagcttctgaagtaagaacagttgtcaaaccagtattgttcttaacgttgaacgtactgtgcaaagttggacgacgcaagtcggcatcgattagcaaggtcttgcgacctgcttgtgcataggtgatcgctacgttggccgtaacggttgacttaccttcactgatgttagctgaagtaaaagctaaggtactaatttcttcatcaactgccataaagttgatgttagtccggatagttctgaattgttcagataccgcactacgaggatcagcaactgtgattaatttggcaccatgcttaattgtatcgtcggtaccacgcttttttctaaataatgccatttacttctcctctcctatactcgacggcttctacgcttagggccattagaattcttattcttttttctaatgacaaatgatgatgacacatggaagtgtgaaacttgacctaagtcaactaaacctaagttatcagtcaagaatgcatcatccttaactgtagtgtcggacatttcacgaattaagactactgcgaaacttaaaaccaagccaataacaaagccagccaaggtaaagagtttcacattaggtgatgattgattaccatcagttgctggcgcaacgatcgtaacgttgttaatgttcatgatgttaggaatttgatctctgaatgaacgcgctacagcgttagcttcaacctttgccttttcaggtgtatctgcagtagcagaaattgagaagacctgtgattgttgttgagtattaactgaaacgctcttggctaattcgctagtagaaacgctgtaactcttaccgctacgttcaactacttctggttgagcctttcttactaatactcggcgaccctctgcattagtcttgtacttagcaggtttagcctttttaaccactctaactgggttagctaaacgattagaagcatcttgcaaaataacatgactagttacaatatccttataggtagtaaccatttgcatgttggcttgttgagtattatatgccgcattcgggtcattcttgttagccttttggttaaccaagatctgtgcattagaagtatactttggtgaaataataaaattagcgacgccccagccgactaaagccaaaccaacactccagataatcagtgcccagatgtggcgacggcaaatttgtagcaattgagtaagatcaattgtattttcagtttgcttttgctcttgttccatttaccttttcctttaataacgattaacgattcataatatagctagccttgttagcagctaccttaacatgtggcaattctagcgccgttctgatcttatcagaaactcgttgacgctcttctctacttaccacttcaatttccatagtgccaaacttagggttttgcgtttctttacttacaccctgagcatgatcttgagaaagattgttagtggcttttctataatccatagcaatcttgtacatttgattcatagtcaagtcagtctgcatctcgctagaaatggaattcaagaaacttgaattaagcaaagttgaaggtgaaacagacttcttaagcaaggccataattaccaagcggtcacgctcttgtctaccataatcctgacgagggtcaccatgacgaagttgggcaaatgctaaagcctttttaccattcatgtgataagtctggcctttgacaaagctataacccatattgttgaaagttaatggagaagttacatcaatccccccaacttggtcaattgccttcttcaaaccacccatattgatcatgatgtagccgtcaattggaacactgtaatatttatcaagtgtcttaatagtttcactaactccacccaatgtataagctgagttgatcttggttacaccatattgtgggtaatctgggaagattgcatttgagtcacgtggaattgaaacaatgcttgtactattagtcttagggttgattgacatcatcatgatggtatcagttctacccttccagtgacgacccatggcaccagtatctgtacccaataacaggatattaattggctttttctcattcagtaaattatcaagagtacgtcctttattactcttggtagtcttagcaacgggagtgtacatattctgcgtcgtatcacgcaaatttttgtagatcatcccgcaaacaaaaagaccgactacaatgatcacgccaataataatccaaaaaccgcgccagaacttacggtgacgacggtggtgatgatggcgatgacaatgtatcggtttattacttgattctgcgttattttccattctaatcctcttaatcttataatcgttattattatatactcaagaacccattttgaccacccttaaaaggtttacatgcggcaaatacttaaaaggaggctcgttttattgctgttttgggttgctgaaataatatattttggtagatgtctaacatgtaataaaaaatgcatccctcgaaaaatggaatgcattgctgctagattgagtttaaacggaattatttttcatcttactatcgccttgccttaaattgtactcacactgtaccatatttagtaagacctaaataaccaaaaagtattaagaagtacattaaatagaagttggatagcatgttaagtattgaagaatcaatcaaagaatttgaaacatattttcagggtaaaccaaatgaagttgaagtagtatcacgaactataaaacaaaaaagtagacggccacataaaccgcctactttatcctaattgttatgatgatcacttgagttagttaaatcatcatttttagttagatcatctatatttccaactactccaccaaatagtgtaaacacacctattccaccaaaaatactaccagccaccgaatgcctttgcatcaccaaaaaagcagaaatacaaatacatagaattgttactattgatactactatcagagatgtccatgcgagccaacctcttcttttttgactagcaacttctaatctccgtctatgcctactttcttcaacaccattattaaattatttccttagcagcattcggatacaatttttggtatccctcaagaatatcaggaagcggaattggtccactatgcatctcaagataagccattatttcttttttggtttctttaggcatctcagatttttgaatttgatcaagaatctattcatctagcgaatctttatctgactttttctttatatcattttctagctttttacttggcttttgatctgccataagatattattccctttcttaagtcgtcccctatcctttgccaatcactggcaatagctttttcctcagcattactattactagaatatatcaacttgtttaataatttgacataaggcatagctacatttttcgataattttttaaacactaattgaatatcggtaaacataattctcacctcattcataatctctttctttattaaaagtatacttaaaatttgactcgtggtaaagattattcttctacatgcgatccacttctttccttattataagcatctgtaatacaataaacttaacagcaaataacgaggtgtttttatgattgataatcaacctaaaaagacaaaagcttatatcgcgggcgtaaacttaaacgaccaaaacttcgactactacatgaccgagctggccaacttgactgaagccaacaacatggaagtagttgggcaaagctttcaaaatgcagaatcaattgtcgccggaacttacttcggtgtcggcaaaatcaatgaaattagaactatggctcaaggcttaaaagcaaaagttttagtccttaatgacaaattgactcccgtacaaattcgcaacttagaaaaattaaccaaaatgcgagttattgaccgcacggaattaattctggaaatttttgccagccgcgctcgaactaaacaagctaaattacaagtgcaactggcacgtttacaatatgaattgccgcgtctccatccctccgagaacaacttggaccagcagcgtggtggtggcttcgctaaccgtggtgccggtgaaagtaaactagaattgaaccggcggacaattggcaagcaaatttcggctatcaagaaggaattgaaggctgttgccggccaggaagaaatcaaagcggcacgacgcaaccaaagtcgcatccctaaagtcgctctcgttggctacaccaatgccggtaaatcaaccacaatgaacggactattgcgtgaattttctaaagaaggagccgacaaggaagtcttcgttaaaaacatgctttttgctacgctagatacttccgtgcggcggatcaacttgaaagacaactttagcttcattctgtctgacactgtcggtttcatttctaaactgccccacaacttggttgaatccttcaaggctaccctgcaagaaacgcgtgatgctgatttattaatcaacgttgttgacgcctctgacccgaacatggtccaaatgattcggacaacacagaacgttttggatgaaattggcgttaaggaaattccgatgattaccgcctacaacaaggctgataagactgatcgcaattacccacagatcgaaggcgacgacattctttattccgccatcgatccaaaatcgatcaaactactggccaacttgatcaccaagcgcgtttttgccaactataaaaagtttgacttgatcctgccactaagcgcaggcaaggaactggcttacctgcatgatcgcgcccaagttttacgtgaagactaccaagacgatggcgtccacatcgaagcgaacatcgcgcccgacgaccaaggacgctttcgtcaatatttggcctaactcgattaggaaaaaatatgaaaaaacataatctgctgttcctttttgccctcacatttttgttagttcctactaacacgcctgtaatggctgctaaatatagtgctagtgagtcaaaaaaggtgcgcacttttcaaaaaagctatcatcgtttgagccagaagaattacaatcagactacgctctttaccgtgcagccaaattttggtattcctttttcagcaggagtgcttgaccctgattacatcaaaacttcaatggcttatgtcaattattaccgctcattggttggactgcctgatgacgccaattatgctaatgataacgttaacgcacaacttggtgctgcagcgctagcttcagttaacgcggagcaaaatctgcgagcccatggtttacaaggttacgtcaagcctggctatatcagtgatactgactgggatacagcggaaaatactacattgggcaatatcaatttttcagaatcaactagcggaaccacggctggcgagatcgttaccgatctgatacgtgaagataataatattgcaggtaatggcaacatcggtcaccgcggcatgatcctctcgacgcgagccacccgaatgggaatcggcgcagcttatggcaccgaaaacaacgtcttgtattctgttgaacatggactatttgccgatgatattttgcgccagcctgtaaaaagccgaatcgtttatccagctgccggcgtttttccttacgaattagttggtggtaaaacgccatggtcttactcaacaaccgagcgaatttctggtcagccgaaaatttacatcacggatttgaccaccaagaaaaagcggcaagcgacgcaggtgcgcaacttcggcactgctctttatggtgacggctacacaacgacaatcacttaccgacctggcaaaaccaagttgatcagcacgcacaagtaccgtgtgcaaatcggcaaacattatagctacagtttcaaatttttcaggcaaaatagcacattgaaaaataaacagattgtaaagcatcgaaaatgaaatacgttgatatgcaaaacggctcaagcagttgtacatcctgcttgagccgttttagatagtaacaaatattgtagtctgttcaacaatcttcatgtaaaataatactcaggtctattgcagcggttagctaccgctaagacttagtaattttagcatggctacacacccctcaagattttttaagttacggaggtggaagcatgcataattgggtagactggagaagtaggcttacaaatgattgcttgggctattgcgtatgcgataacaaaaaaagctaatcacaaggattagccgaaacaacagtcatcttaagttacgattggagttagcgaccgacactcgctagctccttttcttttattattttaatatgatttagaatttattgcaatgtttagaagtgcttattctacgccaatgacgtaacgcatgatgaatcaatagcttgttgtaccaagcataattgtgcttcatataattataggcggtggcaaagttatccaattgtcccgccgcgataaattgattgcgtgtccaatgccaatcctgagtaggataatacaaaattttcactcggattacccttcctactgtaataattgcccgatcatgatgataacgcgtgcgagcaacattgaggtagctaccaattaaagtattgcgccagtatcgattatgcagataatttttctcccaaagtaaggccttgcgcaataccttagaaatgcagtaccattcgcgtttgccgttaggcaattcaaccaaacaccaaagatattggtgtctcttcgccattcaatccaccccttctaattaatatcggctttaattataccgctactagctattcagttagaaaatcaataatgtcagaaaatattaggtcatgatgtcaaatctattcaactgacatcatttgtcctaagaacgcatttaccgcttgcttaatatactcgctgcaaaggtgagtatactgcgttgaatttctggacatggctctgcttaaacggtcttgatgggtgtcattttaatccttctttaatttttactataattttctccacactgaaaactatggcaaaaaaagtagaatttttcagtctagggaaaacttttatcaatacaaaaaagcaagcgcattaatcgcctgcctaaaagtattccaaattacttctctatagtactctcttagcaattgatggtgtaaagtaactcgataccgtttgcaaaatagtaccttgctctggtgttgctgcatttacatattgattgtttcctacataaattgcaacgtggtatggagctgtcgttgaaccccagaagactaagtcacctggctgcaagttgttcaatgaaacagtttgaccaaccttaacttgatcataagttgttcttggtaagttcacgccagccgctttttggtaaacatattgtactaagccagaacagtcaaatgaatccggaccttctgcaccccagacatagttcttacctatctgttgtttagctagcgcaacaattgaagcggccttactagtagcttgcgttgaagaagtttggttagtattttggctagtcttcttgattgccgtattaacaatttgcttagccttcttcaccttagctatcttttcagccttcttctgagtagccgttttagtagctactgccgctgtcttcttattaacagtagtctttgtctgcttagcttccgttttcttaacagttggtgcttgcgatacttctgctttttctccagcagtaacatctacggtataacgcgcttcaatccattcacgcgttccaaccttgtaccacaagttgcccttcttatcgagtgcagtctcagctacattccagaccgtgccgtccttagcacggtagcccatgaattgaccattctcatagttggtccaaatattcaggctcttacctggtaaatagctaatcttaacttgcttaatcgcagtaaaattagctgcacgaacagttttcattgatgtgattgcggaaacacccgtaacggtcagggctgcagccgctcccactttaaaaaaattatgtttcataattgaatccccttggtagcgaaacaggtgaaaacttttcacctaaaattacccactcttactatgtaacgccttcattattgcatgtcctacctcaagaagcaaattagaacattacaatattacaaaaaagacggatcactggaatccgtcttcattacttactatcttaatttaaaacacgcttagcaacacttgggtagaagtatgaactcaaagtttgcttgattacgccttgacctggtgtagcagcgtggatgtattggttgttaccaacatagatacctacgtgatatggagcacttgcactaccccagaaaagcaaatcacccggttgaagattatccatagaaacggttgatccttgcttaacttgatcataagtagttctacccaacttcacgccagcagcgttagagtaaacatattgtaccaaacctgaacagtcaaaaccgttagttcctgtaccaccccaaacataggacttgcctaattgtgctgaagccaaagtaataactgctgaagcatcaccagttgcttgaactgacttcttagcctttttagctttcttaactgcttgagccttatctgaactagcatcaacagtatattgagctaaaatccattggttatcaccaatttggtaccatgtacggcccttcttatcagtcttggtgtcaaaaacattccaagtagtaccatgttgagcacgttgaccagtaaagtggccaccattgtagttgtcccatatgttaattccataacctgcaatgtagttaatctttactttggtagtagcagcttgaacagtagcattagttgaatctggcttgatgacatttactgcagctacaccggtcagagttaatgcagcagctgcggtaacttttacgaaattgctcttaatattcatcaaattctcctgtatgttttcactatatctataagcattcttagaatttattacttaagctggtaacgaaaatattaattcatcgaaaaatctttaaatttctttaatgtatttaacaaaatctataataatgccccaatgttacagtagtgttacaaaagtaatactgatttaataaatattacgtttccgtcaaaaagaaaaatagctagggagatttccctaactatcttaactagatatcttatttttaggaagactaacgcaattagtcgattacacgcttagctgatgatgggtaaaatgaagctaaggtttgttgcttaacattttgaccaggagctggagcgtgaacaaacttaccgttacctacgtagatacctacatggtagttaccccagaataataagtcacccttcttaagcttcttagttgaaactgaaatggtcttaccaagagtaatttgaccgtaagtagttcttggcaaaattttgttaattgcattcttgtaaacgtagctagttaaacctgagcagtcaaaaccgctaggacctgcagcaccgtaaatgtaaggcttgccgatttgcttcttaacaagcttaacaaccgcattacgctccttagtagtagctgattccttcttaactgaacttgaatcaggattggtagtttcaagatctgaaattgagttgttagtattgatagtagtgcttgaaacatcatcagcgtgaacagctggaacattgatcattgaaataccggcaaagaatactgataaagctgcggtgtattttactaaagtacgtctaaaattcaaaattaattgtctcctctaaaaattactaaatttgtttttgatttcttaaatcagttgacggtttatataataccgactgaatgttacacgaatgtttcaaaagagctaccatcgcgttaagaaacatgttaaaaaaacagattttatgtaaaaaaaggagaagcaaaatgctagcgaagctttgctacaagggcatcgagcgcgtttttagtttctgttaaattgtcgttaactaagatatgagcgtattgcttcaaatcttcaggtaaagcatttaattcactgccgctaagtctttctttaatcttggatggatcatcgccccgctttaaaaggcgctgttttaactcttctttagtagaagttgtaacataaagaaaataagccttgtcacctagctgtttaatgtaggaataaatgcccttgatatcgacaattaatgaaaccagatcactttttttccaggccagattcaaagcttctcgacttgagccatattgataagagccgtacttaatatgctcaaaaaagtgcagctgggcaaaagtttcatcggtttcaaaatgataagaaacattctgctcctcgcctgatcgcatcggccgcgtggtatgcgttaatacgcgtggaataccatatttttcagttaaatattctgaaacagtcgtcttgccagcaccactaggtcctgcaataagaattatttttttcaaaacctgattctccccacttgaaaatgttgcttttttataatagcattcttgtgttataaaagactaagactttttctcggaaggaagatacacataatgaaaaaagcagacgtaaaagttggtgcaatcgttggtgccaagtcagaagaagaacttaagaagccattccaaggcaaagttgaaaagatctacgaaaattccgcattgcttgcaattacttcatacgatcccgttgacaccactgctatcagcgacttgaacaataagatcgtagttaacttcaagaatttaaagactgctcgcgctgccaagaacagcaagactgcttcaactaatgaagttaagattgaaaaaattgccaagaagaacgacgataaaaaagaagcagacaagaagtaaaatttgacaaaaatagcccgcgcaatgtttacgcgagctatttttttgcctaaaattaggacatcgatacgagaggaaatattttatgaaagaaaaaacgcgaactgttttattttggtttattttaatccagccctttttagacctttattggttctacaacggtaaattagcggaagttttaccatttactctacctacgattatccgaattttagctgtttttgtgattttctgtatgtttttcagtcaaaagcaaaattggcaaaaattagggcaagacaagtggttaattctatatttagccctactaattttgtattcgattattcacttaatccacgtcaaaaactttaacagcattaatcctaatgactacaattattcaaccgtaagcgaaattttttatctcattagaatgcttttacctctgatggtgatcttttttacaaaagaattgaatttcagtcaggagcaattcagacacgttatcgaaggcatcagcggacttttttcatttacaattgtcattaccaatctttttgtcatttcgcttagaagctacgagacaggcccgattagcgctaatatttttgaatggtttgttaaccccaatatcggttactcccatatggcctccaaaggcttcttcaattttgccaacatggtatcagccgtactctttatgctggtgcctctgatgctttacttcatgttcagtcgttttaactggaaaatcgtcactttgaacgtagttcaagctttagcgatgatcgagttaggaaccaaagtggccctcatcggtttaatcggtggcgtgattatcagtattttgctgtatgttttccacttatttattgttaaggatgttaacaaaaacggcaaagccattatcgtggcgcttttaatcgaagcgggcacctttgccatcatcccctttggtccagcaatccagcgctataattatgaaaaatatttggctcagcaatccgatgattctttgacacaggccaagcgagaattaaatgctggcttaaaaaaatatcctcaaggtaaacagcgcaaggaatttttaacgaatttcatcggcaatcattatcaagattacgccttaaataagaagtttgtttttaaaagctacccttataaatacgatcctgaattttggctcaaaatcatgaacgagccaggcaccgctagaatgcaaaatcgacatgtagaaaaagcgatgcttgatcaagttgtgaagactaacaataatcgactcgacaagttcctgggcatttcttacacacgagaaaccaacattttcaaccttgaacgtgatttcactagtcaaatttattcacttggttggatcggcatgctgttgttcattgggccttatgtcattatcctgctctacgctttaattaagtggctaatgaacaaagaaaagcggacttatttgatcagctcaatgttgctttcaatcgcctttatgattttcgcagcattctcgtcaggtaacgtaatggacttcttaacagctagcttcatcctggctttcgttgaaggcagcttgttagctagcgtaaccagaaaagaaaattaaacataaaaaaagttaggtagttgcttgcctaactttttcttagtttttaaacattatttttcttgcttaataaagcttgaatctggcacccgaattaagtagtaccgagttgctaaatgacctgcatgcatcccgattccattttgccaattccgcttgtacttagccgtataaattgccacgtaagcacgttgatactttttatccattttagccaattccttttttacataaggaatcttctccgcattcacgtcaagcgcagtgttaccataagcaatcgaagcatagtcactaccaatcgtgaccttgctgccatcgcgataaaaagtataagtttgtgagccatatctcttcttagcagaattaatcgttacatagcttgaatttcccgcacctgtacgcattatcagtggctcatacttcacgcttgaagtaatgcggtttgcatcttccaggtctggattgtccataaaagtctgattaaacatccaacctgcagctaataaaagtactacaatttccacaatattaagagccatattcggccaactaaagcgtttatgctgtttgataatcatcttaatccgtctttgacggatgttctggacgatgaaaactaaataaagaatgatggcaacccaaatcaggatcccaatgatattccagctgaacatatctcgccctgctatataaaacatagaaacatgcagaagttttcatatttctacatgtcagaaagaaatatattttcctttctttgtcttatttactgctgtcttcatcagtattccgatattccatctggggagtaatcgcattgactaactcttgcagcttaagggcttagccagcccattgtttttattttgttaacgctagtaaatttaatactgcattgtcatcacgatcattgctatagccacattcataacaaatgtattcattatgcttggtgccatgttttttattgccctgcagagtaattttgtctgcaccagttttgacatagccacaattggcacatctttgtgttgatggatatgttttatcagctagaattaattctttgccataccattcacacttgtaagtcaagacttgtctaaacttgccaaatagtgacctttgcatgcctttggaggctacatgggtcatcatcatttgtttgacattcaagtcttcaatgacgatttggtcataattgtttacatgctcagtggtaaatttttgcaaaagatcattctgaatattggctgctttgcgataatcacgctgaagcttggttctcacttgcaggtaattattgctttggcttgccgatttaccgttaactcttctctttttagacaatactctttgataatgcttgattcgcttgtacagtttctgtagttttgctggcaaaacattaatcttgccttcagtgtagttgaaatgcccaacgttgacatcgatggcggtctttttgccagttttagcctttagtccagcctcttcttcataggaaagggcagcgtaataatgtcctctttctctaaagatgctggcaattttaacctcttccatctttaatgcctcgtatgctggaatatcaaaccaagatttaatccctctaggcttatctaatctaagcttgccattaattatcttggcgcgatcagttttaaagccttgacgtggagctttcttagatttgaaatgcggcttgccccaatcaggctgggtcttgtcaaagaagttcttccaagcattagccagatccttgactgctaattgcagacagcgagcagacaaagcaaattgccaatcagccttgttattgactaattcatcccacactcgatgctcattaggactaggattattatccttgtctaaagtccaagcttcatacatgtcttgccaggttgctaaagctagattccagcagtatctgcgatagttacaaagacgttcaagttctctttgcattatcttatttggccttaattcgactacctgagttttgatcatttgtttcacctccaatgcaaacataagtttagcaaaggatgtaacaaaaacaagcgaacaaaatattaaatttttagcagcagttaatttgcttctatgttttgcctttctgaacaaattacctgtatctttttctatattgccattaaattctatatttcagctaaccatttaatcctcctttttttcaattatatggtaaaaaaagcaaaatttgaataggataataattgaatacttagttaaatagtgagaagatcttactagtacattagatttattagggaacattatggtagcaatagctttttattcaattactgggcaaacggaacgttttattaagaaaactcaactttcggcccatcaaatcgacgatgccaaccctaagtatgatatgggaaaatcttatatcttaatcgtaccctcatatcaggacttcatgatggattcagtcgttgattttttaacgtataaagataacaaaaaaaatattatagggattatcggttgtggcaaccgaaactttaacgacctctttgctcaaactgccaaaaagatcacggcaacattgaaagtgcctattttgtatcttttggaatttagtggtactaaccaagatgtcaaaaatgtacgaaaaatcgtacacgatctttctgctggtgagagtactaagcaagtccaaaagcctaaggaattacgtgggaatatcagctttttgagtgattttagagattaaatatgactgaaaaatattacaaagcaattaactggaatgacatggaggaccgggttgacaaatctgcttggtcccgcctgaatgatattatctgggaaccccgtaatgttccagttagagaagataaaaaagaatttttacaattagacaagccggtgcaagatgccttgcttcacgcattcggagcactatctttttcatctggactccaaatgaaaaatgggctagagcaaattaaggtagatgccatcacaccagaggaagcagctgtgctgaatgccttgcaatatttggaatctattgccaataaaggctacagctacgttatcaacgagttgacggactcaaatatagcaaaagacgttattaactgggctgatgacaatccttacctgcaaaagaagattcggattttgaataaaatctaccaaggcggggatgcactacaaaagaaggtagctaacgttatcctagagacagctctctatcattctgccttctacgctccgctttatttattcggacaaggcaaaatggtacgaacagctgaaattgttaagttagctttacgtggcacttcatttagtgggatttatcctggttacaagttccgcttaggctaccaaaaattaggtaaaactgagcaagcagagctaaaagaatggatcgataacttgtacgatgtgctaattgataatgagaagaagcacattgagttaatgtacaagggcactgactggatcgatgatgttacgcactatctctactacagtgtcaacaaggcctacctcaacctaggtttttcagccaagtatcctgacacttctgattcaatcaaccctattattgaaaaaggggtcatcaagaatgcagtgcttgaagacttcttcttctacactaacgatcactcgctgactaagtttaaagaaattaaataattacaaaagacgcaatcgaaaattcggttgcgtctttttttacttcttagtagttttcttggttgcctttttagtagcggttttcttttctgcttcctttttttcaggcttcttatattcacgtattgtggttagcttttcaataattgcctccaccagttgatcaacaatcttcgctggatcttgttcgatctctacttcactggctaattgatcaattctaaagcctgaaacattaacgtattcagagcgcgtttcaaagtaaacatttaaaggatattccttaccctcttcaaagaagttagcaactcgtttgtaattgctataaggcaaattgataatatttgtctccaaggcaaaagtagccggccgctgacccgtcactgctagttgcgtttggatcaatgaattatgcttaaaagcagcgataacttccttgaccatcttttcagcatacggcttgattttgctcttcgacttgctaatgtcggcatatttaactgtttcaagatcttgaatataatcttgattttcaattttttcgttgagatcttttaaattaatttccaaaataaactttcctttttcattggttataattacaaaatactacaaaaaaattttttgtcatcctttttaaggattcaattcagtatttttagctttttatttgttaaaatgacactatgaaaaagcaaaaatttgatcttaagtatttatttttactcattcccattacgttaattctcattataggattgatttacctttttaacaaaaataaaatcgataatgaaattaattggatgacaatgaaggaagaacagcggctcaatgtcccgctagaaaatcaactgcccgatctacccaacggctgcgaggttactagcctatcaatgttactgaattactatgacattaaggttaacaaatatgatctcgccgataatattgctcatgttgattctttcaccgacaacggtaaatatcgcggcaaccccaatcaaggctttgtcggccatatgtctgtcgctaatgctggctggtgcgtttatcatgggcctttatttgacgttgcacgtaaatataccagccacatagaagatgcctctggcagcaattttttagcgattctcaagttaatctccgatgggcatcccgtgctgatcattaccacaaccacttttaatcatgttaacaatatgcaaacatgggaaaccaatactggtaaagtcaacgttacaccgtcatcacatgcctgcgtgatcacgggatacaacaagcaaaagaagcttgtctatgttaataatccttacggtattaaaaaccaaccggttaattggcataacttagaattgagttatgaccaacaaggacgccaggcactttacatcaaataacaaaaaagggcaagccacgaaggcttgtccttttaactcaaggcacatgctcaaagcatatgtggacgtttaaactgttcacatcagtgcgtccaacatcagcacttcccgtgcttgccacttaaggcggatgtcctctatctcataaatatacgcatctcgcgttcattaatcgactcgtcagtcagtaattgtactattttttatgtttgatgtacagtctagcacttttaaaatgacgatatttaaatttataaaaaacttcagtacacatagtcgataacatgaaacctaaagcaatagcaccagtaacaattgctactcgtagaagcaaattctctccttgactataatcccccacaactaaagcacgtactgcttgataagcaggcacgcccgggactaacggtactaaggcaggaatattaaagaccgtcactggactttttttaatgcgtgcaaaacacaagcccaaaatacctatcaaaaaggcgccaattaaatttgaaatcattcgcccaaatcccaaattaaagcaagtccaatatgccatccagcccactgtgccactgactcctgacaggtgaagatcgcgatgcggtacattaatagttaatgcaaaacccaccgaagctacataagaaaaaatgacattaataataatttctaaccaaagtggcatttttatactcctatgaatttaagtacaagtgcaactccaccgcctaaagctaaagcggttaacacagcctcgcacattcgcataatccctgataataaatctcccatgaatagatctcgcaaagcattagtaattgccaagcctgggactaaagtcatcagagcgccgatcaaaatattatcagtaatcatttgtggattaaaatgattgaataatactgccaagatccccatgaccattgctgcaattagctctgataaaaaacgaatcttagtatattttttaaactcataatacgaccaaaaaccaacagcccctactaaggcagcacctgggaaatcaacccagtcgtaattatccataaacaaaaccatcaaggtagcagacaatacagcagctcccaatacctggagccacattgggaaagtaggtgcttgtgatactaaagcaatcttttcttttaattcagaaagagtgatttttttaactgcaaattggcgcgacaagtcattaacccggtctactaattccaaattgatgttgcgatcacgaatttgtttcatctgacttagcttgccaccatctaagctcatgaaaacacaggttggcgtcgcaaaaacacgcggatcatcaattccggcattgcgagcaattctgagcattgtatcttctacccgatacatttcgctcccgccttcgatcattagtcggcccgcagttaaacaaatatccattacttcttgataaaattggacatcccgcttctcagacatagttttagcctcagttcatagtttcaatatcgatggtcttgtcgacccaatcaccgcggaaaaagtcacgttcgtgactaacaataatgactccgcctgggaagttaacaatcgcttttctcaaagcatccttggtatcgttatccaagtgattagtaggttcatcaaggaaaagcaaattagctggttcaaactgcatcttagctaattttactttttcctgttccccaccagaaagttcctttagtggactcattgcttgttgtgcagttaagcccatgcgtgccagcgcttgtcgcaattcctttggctttttgcgttcaaattcttcttgtaaatattggagtggagtcatgttgctattaggccaggttagatcttgcttgaagtaagccaactttgcagtaacagataactcatatgaaccataaattggctttaattgccctaacaatgtcttaagcaaggtagtcttaccaattccgttaaaaccagtaatcgccactttttcatccccaccaacagagaaattgaaggctgacttgaccaaagcatggtcgtaaccgatgaccaaatcttgcgtctgtagcaacaaattagaagcagtcgcaacatatggaaattcaaagcgtgccttgcggttgttttttggcggtgtcaaaacatccatccgcgccagctgcttttcccgtgacttagcactcttagcacgtgtacccgccttgttcttgcgaatataggcctcagtcttagcaatcttgcgttgctggttagcataagccttcaagtaggtctcacggttggctgctttttgccgcaaggcttgcttcaacgttcctgtataacgagtaattgtgccaaaatcgatatcgataatgcagttagtgattcggcccaaaaagtcataatcatgactaacgacaataaaggctccagcaaaattgttcaaatagtcaaccagccaatcaatatgtgaaacatcaagatagttagtcggttcgtctaaaaccagaacatctgggctttgcaacaacaactttgctaaaattattttagagcgctgaccaccagataacttagaaacatcgtgatcatagcctaaatcagctagtcctagtcctgaggcgacttgttcaatttcagtatcaatatcataaaaattattttcttctaaataagtctgtaccttgccggctttttctaacagggcttcgtccccgttttcggcatatttggcatacagatcattcaactctttttctttttgaaataattgatcaaaagccgtccgcaaaaagccacggatagtcacaccaggtgccaatttagcatactggtccaaataaccaacatcaattttattttgccaagttacttgaccatcatcgggcaaaatttcacccgttaaaatcttgattaacgttgacttgccaacaccattttgaccagtaacccccatatggtcttctttgttaagcacaaaattggcatcttcatataaagttttatcaataaaactctgacttaaatctttaacagttaataaactcatttttcatcccctattatttagctgattcatgttctttttcataattttggagtgcatcaagaacacgaggccaatagcgcttaggtaagatcagttgcaaacgatcatgataaataggaaaatcacttgcttttagccccgtaatcttagctagctcctgatctgtcagcttatatttataaacaatacgcttaatttcgactgatgcatgtcctctaaaataggataggccgaagaaaaagatagcaaaaacacttgctgtgatgattgctaattgcaaattcatcctgaagctgtgtagacaaataaaaatcacggcaataaaagaaatcacagctgagagtacaccgtaaataactggaaatattgattctttttcttccttttgcataatcttttcctccctaattgagacttagtaactttacgaacttagcagaaatcagccaaatttgcaagattctacgttttcactgatttttttacataagttaagtatacttagcataattaaaattgcacggagaaaaaaggaaaatgaaacaagaaaaacattattatttcacaccaattcatttgcaaattaatgacttagacgtgcaactagttttgccacaagtcgagcaagcagcagaattatatcaagctgttgcctgtgaccgtgaaaatttaggtaagtggctgccgtgggcctacaaaatgaaaagtgcacacgatgaagctaattttattaaacaaattcaagccaaaatgaaacggcagtcaatactcgttttaacaattttagtcaataagcagccaagtggcatgatcgacctgcataatttgattccaaataaaaaagccgagatcggctattggctgtcgagtaaatatcaagggcatggtattgtcacgaagagcgtaacggcgttatgccagcatgcttttagtgagtttaacctacactatattgatctgctagttgctgtcggcaatgacaaaagtgcaaatgtggctaagcgttgtggttttaaattgatgggaattgaaccacagctaattaatgggcctgacggacaaatttttcgtttgattcgagggtaaatatattgtgttcgcttgttatcaaagctaatattagataaaatatttaaacaagtgtttgagcataacactttactataaaaatgaactcaaatataataaaagtgtaaggtgatatgcatcaatgagtagtcggctcatggtcaatctgattctaatgcaggacataagggcctgacgggtagcagggaccaaaattaaacctgatattacatatctaagacgcaatggcttagttggtggcagacaccaaaattaaaccgactttaggagttcacaatttgtggactccttttttacttggaggaaaagagatgaactataaattatttaaatcagttaatttaaaagaattggggcaattacgtcggtacatatccattatttataatagtgctgatttttatgataaacattttgtaaataaaaccatcatttacactactaaaaataataaaattgaactcactgcaagaagagataactttatgcatttatgtggaatttcatatatcgaagggccaagaaaattttttaatgatgctctagatcgaaaagtacagctaaaaaagttcttattaaaaaagatggctctacttttcagaaattacaagttttaaatcaacttaaagaaatgttaggtccacacttaagattaacaggacgtggagcctttacatacctaaaattcgatcattctttacgtacaaataaaacgatcttggctcttgcattattaaataatcaaaattatatggttccaatctctttgctaaatttgaaattcatccatccatttcctaaaggagataagattattaaaatagaatctaaagatctaaatactggtaagattattactcttagatgattcgcagctaaaaccacccagtcaaatctttaataatgaaaaagataaccggcaccaataatgatggcaagaaattcagagtcttaacatcacgaatttttaataaagacaaaccggagcaagcaatcaaaaagccaccaacaatagacaattcagtaactaatggacctgtaaaaaaatcagccgacaaaaattttgctaccaagtaaatgctaccttgccagcaaaataaaaccggaacgaccgctagcatcccccaaccaaagctagcgccaaagaccatcgaagttactaaatccagcatggcattggtaaatagcatagtattgtttcccttaactgccgccatcacgggacccacgattgacaaagcaccaatacagcaaagcaaaatctcagtagctagacctttagctaaattagatttgcctgctttatcaactaagtgattaaaacgaccagcgatattgagcgcggtaccgactactccacctaaagccaagctaacaatgaacaaaactggatagtgacttttaggcatgctgttagtcacattctcccaaccgatgcctaacgctgccagtcccattgcgatgaacaaaacgtcttcataacgcttattcaatcctttctttaccaagcagccaactgtagtaccaaccagcaaagcgcaagtatttacaattgttccgatcatttttctcacctcttagttttattttaccgcagaaaaaaagtatccatctcggatactttttcatatttaccatttaaaatgccaactactactcgatgacgctgaagaactagatgaagatgtgctttcacccgtacctgaaccataaccagaattcgaaccacctgccggcttatcttgattttgatcataaatccgataattggtgaaagcattgggatcatcccacttgatgtgattgttctgatcattcaattcattttgccgcgtttcttcattgttcaaagtttgtgtttgcaaattcaggttcttacgaattttatctgacgtcttttgtagttccttagtagacgccacctgaattgaagaaccatcaatccaagcatcatgcccttgaatgtagccactctttaagctattcatgcagccacgataattgagcgccaaactaagcatatcattgaatgtcagattagttttcacatatttattgaaaatatctaccagcttgcggtaattgccaagcgtattaaccgacattgccttatgtgcaattgcctcaatcacctgacgttgccgcatctgacgaccatagtcaccacgtgggtcttcttttctcattcgaacataagccaccgcgtgccgtccatttaaatgctgcttgcctttgtggaaatcacaccagtcatacgagaagtcaaatggaacttggacatcgacaccaccaactgcgttaaccaggctttttagcgccttcatattaacttctagataataatcaattggcacatttaacattgatgacacagtcttcatacttgattcatgtccaccgatttcataagcagaatttacccgaaacatgaagtatttattttctggatcgcccttaatatctgccaaagtatcacgtggaattgaagtcattgtcgcagaattcttttgtggattagctgttgctaaaatcatagtatcggaattaccacgatcatggcgaccttcaatcccctggtcaacccctagaactaggatagaaattggctgtttattggcaattttagctgaagtagcagtgttgccgccgtttttaccatcaatcacactatggacggtaaaatacatgtgagcagcccatgccatgccaaaacaagcagttaataatactgccacaccaatcaagcgggcaaaaaagttacctgatttgagcgctgatgcatctgcggctaaagcacgattccgatgaagattaagcgatgaacgatgagcgcgataaccttctcttcgttttggattttggtccattcttttgatcgtttcccttcgaatttaatacaagttagtttatttgtatcacttttaatctctcgataaaataaaaatgctaataattaataataacttatttttttgcgaaatataacgcaacaagctaagatgtatagaaaatgaaatattatggaggtaaaaatggcaattccaactagaaacgaagtccctgaagagcttaaatgggacttaacccgtatttttaaaaatgacgatgaatgggagcaagcttatgcagctgcacaagaaaaagtggctaaacttgctgaattaaaaggtacactagctaaatcaggcaagaacctgtacgagagcttaaccaaaatcttagctgttaaacgtgatgtggaaaatatctacgtttacgctaccatgtccagcgatgttgatacttctaattcgcactatctcggctacgtcagccgggtacaaagtttggctaaccagtttgaggctgcaacaagttttattaatcctgaaatcttgagtatccctagtgataagcttgagcaatttaagcaagctgaacctagattaaaggattacgcacactatcttgaaacaattactaacaagcgtcctcatacattacctgctgagcaagaaaaattgatcgccgatgctggggatgctttaagtgtttctgaaaatacctttaacgttttgaccaactccgacatggaatacggttacgttcaagacgatgacggcaatatggaacaattatcagatggcctttattctttgctgatccaatcccaaaatcgtgatgtcagaaaaggtgcttttgatacactttatgccacttatggacagttccaaaattccttggcttcaactttgtctggcgttgtaaaaaagcacaactataacgcacgtgtgcacaagtataattcagctcgtgaagctgctttagccgataatggcgtacccgtagcagtttatgacactttaatccaggaagttgattcacacctagacttacttcaccgttatgttgcgctacgtaaaaagatcttaggcctgaaggatctgcaaatgtgggacatgtatgtgccactaaccggaagaccttctctttcatacaatttcgaagaagcaaaagagacagcaaaaaaggctttggctccacttggtgaagactacttgaagcatgttgactatatttttaataatcgtgtcatcgacccaatagaatctaaaaacaaggtaactggtgcctactccggtggtgcttatgataccgatccttatgagttgctcaactgggaagataacatcgattcactttatactttagtccacgaaactggtcactccgttcactcctggtacactcgcaatactcaaccttacgtttacggcgactatccaatctttgtggctgaaattgcttcaactactaatgaaaatattttgaccgaatatttcttagaccacattaccgatcctaagacgcgggcctttatcttaaattactaccttgattcatttaaaggcactttattccgtcaaactcaatttgccgtgtttgaacaattcttgcacgaagccgatgctaagggagaaccactgaccgctgacactttagacgacgtttacggtcaaattaatcagcattattacggcgatagcgttgaaccaggcggcgatattgcccttgaatggtcacgaattccacacttctactacaatttctatgtgtaccaatatgcgactggctttgcggctgcaacggcattagcaaacaaggtggttcatggaacgcctgctgagagggatgcctaccttggtttccttaaagctggttcaagtgattacccaactgagatcatgaagcgtgctggcgtagacatgactaagcctgactacttagaagatgccttcaagacttttgaaaaacggttgaacgaatttgaaagcttgattgagaaataaataatcgcgctcatataaaaataatcgatatcatttcgtgagatttgatatcgattttttgttgatgatcttgatttattacttggcatatttatcgctcaatatgtataatacgtatataagtattatagtgccagaaaaggtgaaaaatatggctgaaactttatataaaaaggtcgttaaaaatggttcttccttagctatcaatatcccagctaaggaagtaaaagagcaaaatctcaaagtaggcgatattgttgaagtaaaaatcaaaaaatcagaccgtcctaattctgaaaatttaaaagaaatagatggcttaatttctgattactgggatatgttagagtacttaaaggataagtagtcaatgaagatcaattatctaacagaaaaggatattttagtaatcaatgcaagggttattcaaagagaaggtgcaacgggacaaaaacctcacgttagggatgcagaagcccttcattttttagttgttcaacctaagcaaactagttttggacaagaattatatccgtcttttgctgaaaaagctgggattttattaattaaattagttaaaaagcatgtttttgaagatgcaaataaacggactacagcaattgcattcttactatttttacgacgcaattcttatgaactaacctgtgattggcaagatttagcaaatcaaatcttaaagatcgctcaaatagatgacaatgaactaaattaccaagaaatctatcaatgggttaatcaagtaattcatgaaaactaaaaataatcgatatcattttcgccctaatattatattttatatgaaataataaccactttataaaaaaataagggctattaacccttattcataataaatccatcaactatttcctatgtcatactactactcgattgtcctgcataaccagctagtgtagcctgcaagtcatgaataactttaggagcattaaaatttttagcaaattcgtactgttgcaattgataatataatctagaaccgatatataaagcagaatcattattttccgcttgatcaattgttctatccaaaattcttaccaaatttggattatcaattacatctttactaaaacgaactttttctagttcattttttaactttaaagtctcatccttcttaatcattatttacaccaaaggatgcgcaaatggtccatccttctgccatccagtatacataatacgaccaacgctatcccacatttgtgctaaattatcatgacaataatatcggttgcaatatacaccattaccatagtaatggtactttccgcctccgcgcttgtgatgtgtaccgcctaaaacttgacttaattgattttcttttagttcttgaaactttaccattccagacacctccgataaatctttaagcctgcctcacttagtacttctatcaacttacatatataagtctaccaaaacagtagtgttttctaagaaaacgtcagaaactggcaacgttcatatcatattctgttaaaatacataatttgatcaagaatttagtacctgtcgatttaccaatcaaatactccagttacaataccgttagcacccactgctgcatatctttctagtttcagctgaagttcaactatagctttaggtagttcattttcactaaagttttctttcaatttcaaagacaaattagaagcaatcgattgaattgactcatgcttatcagctttcgcaatagcagcttgtaataactcaaccaattcggcatttttcttaacttgaggatctgaaatcactgtattcaatctactcttaaatgcagcttcttctttaagattctttttaaagaacatatttatctccttgtattaaccttgatttttcagaaaatcatacaactcagtagctgtttttcctccacctacccatgcgttagcaatttcaccgtttttaattcgcataacagtgggagtacctggcacttccaagttatcaaaagcataatctgcattatctttactttcatcaatatttaaatagtataattgaccaccaatcagattattaaattcatttaaagtggctgaatattgtcgacaataatagcacgttgggcaaccaatatacaaatatctatcaatattatcttttttatcgaaaaaagaatctacttcatctgaattaagagactgtaaaatattttgtgtaaggatgaatgattccttaaatttatttctttaaacattagaaaaaggagttcctttctcgtatgattggtttgaacaaaaaaacacatacagaaagaagaactccttcatgaatgattttaccaaagattttgctcaagctctattcaatccagacaaaataaatgatttattgcgcaaagagctacaacaggctgttaataacttgttagaagctgaattgactgcctttctgggctatgatccctatgccagaaatggctggaatactggcaactctagaaatggtgcttatttccgcaaagttgatacgcaatttggcccaattgaagtgcaagtgcctcgggatcgcaacggtcaatttcatcagcacacgctgcctggctacaagcagcactcggatatcttggaaagcatgattatcaagctttactccaagggcgtgaccaccagggaaatagccgatctaattgaaaagatgtatggcagccattacagtccagcccaggtatcaaatatttccaagcagatgattccaaaggttgaggcttaccacaaacgcaagctaagcgacaagtttttctgcgtctatttggatgcgacataccttcctttgcgccgagaaacatttgagcgtgaagcagtctatattgccattggcatcaagcctaatgggcacaaggaggtcattgactactgcattgcacctagcgagaacattgaagtctggacagatatgcttcaaaacatgaaatcccgaggcttaaagcaagttgagctttttctttctgatggtgttgttggcatgaaaacagccttggccaggacttatcctaaagctcattttcaacgctgcttggttcatgtcatgcgcaatatctgcgctaaagtacgcgtcgacgatcgtgaaaagatcatgaacgaattcaaacaggtgcatcaacagacaaacaaagaagaagccacagctgtcctgcatgacttctataccaaatggggcaaggtttacagccatgttatcagaagcttgaaagacatagaaccagatctgctggtcttttataactatcccaagcagatcagagcttcaatttattcgactaacatgattgaatcatttaacaatgtgatcaagcgcaaagctaagcctaaggcagagtttccaactgaacagtcgcttgatgcttttattggcattcaggcaatgagctacaatgaccgttatttcaatcgaattcataaaggctttggtcaggttcaggacaccttagaatcctactttgattaaataaataattaaaaaatcaatttacgagaaagaactatttacacaaaagatttgacagtttcttaattggagacgctacaacttgccaatttatagctaaaatacctaaaattaataaaataaaaatatttgtatatttttattgctttttcatagttttatattcctacaaaaatctcagcagcaaaacaatggaatcacaattggtgccacaagttttactgttctaccaacatccttaccaaatttatagcaattatagcctcttttaccacctacacattctagtaagttttcatcttttaaactttcaaattttttcataattattcctcacctcgcatatttacatagtccttccttaaatccacgccaatacttaccttccgacttccaaaacttgttccatcctttactacctcctacaacacttaccaattcgtttgaacttaacttttcaaaaccaacagtattttccatttttatacctccgataaatttttaagtctacctcgcttagtacttctaagcgcatcatcaacttacatgtataattttaaccaaattaattcaatatccatgttatcgttatatattgttaacatatacatcacgcgtggtgctagttaaatcgttctagacaataagccaaattataagctaaaattgcaatttccaaccggctttgaaagcctatcagactacgtgctcgattgttctcggcattgtaataggtcagaagcgaaaagtcgctttcaattgttctgcgaatagccatcaattgatgatcattgtgctttttagctcctgtcatatttttacgatatggtgtccaaagttcgtaacccatttgttttagctgttgatgcagttctttgcctaaatagccttcgtcgccaagaagatagtaattagatggatgggtattttctatcagttcaactgtctccctggcatcatgaactgatgcctttgttacgacataatcaagaatgtaaccgtcatcgctaacaatggcatgaactttgaaaccatagaagtaaattttcttggtggccttataaccaatgttggcataaccgcgaaaaattttagcacgatagttgcgaattggttggcaaacaggtaccggaaagctgtcaatgatcaagaactgtccattcaggtcaacctttttattcatttcttgccgtatctgataaatcaattgcaatagctgacgtgaacgccgattaaaacgtgagtgtgataaacaattgaaacattcacagaatcttctttgtgattcaattcctgtcttagcttgccagataagtaaagccaaaatcagactgtccgtagttttaatttgatcaatatttcgccgatgagtaaactcagccggtgcatacaaacgataccagtgccgacaaattatcactaaatctttaaaactaacttgtaaatggtggctaaaacgcttaagcttaaggcagttcaatcagatcagactcttttctattattactatttacaagtcgagtctaacaagattggacttttttattaactaaaacgatttaactagcaccacgcgtatacatcatatttcactatgttacacaacttgataaagcatcattttactttgtatttccaaaacagtttaacaaaaaatcatcagtaatcgcgcttatacaaaaataatcgatatcattttgccaactatgatatcgattatttacatgctgtttgatattgaatttttttattttctagatcgaaccagttaagcccgcaaatttccacttatctggattctcatttaacatgatctttaacctaattagtgcctgtggtaatttaaaaccatgtactagtgaataattattcaaatcacggttcagttcaaatactaccttatcaaaattaacaccctgagttaacttgcttaaaccttgattgattaacttcgttgcatctcgatcatttacagtctcttgtcttaattcctcaagaatttttttaagattttgtccattatcttgcaattttaagtcgcttccttttaattaacctctactgccccatggtccatattgtaaccatccattggctacggtttgacccgctttaccccaaattgcaccgtaatctgggatagttttatgtgtcttagtattatacaacatatatggagttaatcgaataattttaccaccaacaactctatttagctcaatattatttactaccttaaaattcttcatttccaatacctccgataaatctttaagcctgcctcgcttagtacttctaagcgcctcatcaacttacatatataactttaccagaatagcaggattttctatgacattgtcataaactgacaatattcacatcatattctgctaaagtacataatatgaacaaaactcatttagaatttagcaccctggatctaatataattaaagtagctagctcttcccgtaataattgacacttttccctgcatcccataccgcaaaaaatttctctctgacttggtagtttttaccatagtttccacttcaaacatacttatttttttctgttgaacagggtaagtacctatattagtaatttttccattaagtatttcagatgttccctgcttattttcaatattaaacttcatacgttgacccttatctagcacagccacttcagagctaggaacgtacgttattactcttaatttctttctatcccttatatcaggcatcgcaacactattcttattatctagatgaataataacattattttctaacataccttttttgccatcagctagagtgacactaattcctttagataatttttgcccttctttatattctttattctctaacgttactacccgatctggagtaataactcccatactattcatcacattttcatgcacagcaaaaaatgatccaataaatagtaaaatcacaaaaataaaagctggtaaaattatcattgtcgaaaagttacgaaaattatatgaatagaatttactactttctaaatcttgatcattcatttaatatcacctagcttttcaccaaatcataataatacccatgtttagccattaattcactgtgattaccttgttctacaatttgaccctgattcaataccacaatattgtcagttctttcagcaatagctaaacgatgcgcaataaatataacagttttattctttaacctaattaaattatcaaccacttttttctcagtaattgtatcaagcccacttgttgcttcatcaaaaatcaataccttagcaggtgaaagtaaggccctagcaattgttaatctttgcttctgaccacctgacaaaatcttagcattttcatctaattgtgtattaaatcctaatggcaatttttcaatgtcattctttatctccgcgatttggcaagcttcttctatctctttttcagttatattcttacgacttcccaacaaaagattctctttaatggtacctgcaaaaatatatggagtttgtggcacataattcacatatgagcataaaacatgcttatttatacttctagtcgaatgaccattaaaagttacttttccttttgtgggactgaaaaaatcaaccaacaatttaaccatagttgacttacctgatccactcattcccacaatagttaatttctcattatctttgatcgtcaaattaatatcttttaagacatcttcaccatatccataacgataatcgacatgtgagaaattaatgtctccatttaaatcatgactatcattaactgaagttttgcccttaaattcactttgaactaaataaacttcatttaaacgattctgagctacatttgcagcttgaagtgtaggttgcaagttaataatattttgtaatggatcaataaaatatgataataatgcattaaatgccatcaattcaccaatagacatctgattatgcattacaacacttgcccccacccaaagaataatgacattcagtgataatctaataaaagttttcaaagcagtttgaaaagcttctgttttgctatacttaaaagctttttttaaataatcaacaaactgactatcaatttttcgataacgtacttgttcactgtttaatgctttaatcgtctcaattccttgaatatcttcaataattgatgaactaactaccgcattactttccatctggtcattatttaatctttcaaacctttttgaaaagccgagaataacaatagcatagagtggtaatgaagctagcgtaatcaaaaacaatgtcatgttttgaaccgccaaaattatacccattaaaattacaattgaaagatcaaggaataatgaaatcaccgtacttgccaatgcatctataattctacttgcatcagaaaaacgagaagtaatctcaccagtttttctggtagtaaaaaattccatcggtaattcaaaaatatgcttaatgtattgtaaattaagatcgattgataaccgctgccccaaaacattcaataaaaattgctgaccatatgaaaaaattgagttaaagacatatgcaatcaataacccaatagctaaaacagataacgtggtaaatgtaccgttaggaatatatgtatcaatcaacccttgtacaaaatatgagctacagatactaatcagtgtcatcagcaaagcagctaaaataatgtttctaactaactttttctgtttaaacatataagggaataatgataatagattattctttttctcctttacaggcttaaaatctgccttaggcaccataaacaatgtaatacctgtccactctttttcaaacgcctttttggacatttttttaattccactagtaggatcaggatcggctacgattatttttcttttagtatttttaagaactacataataatgtaacaatcctccatcttttatcacatgaacaataaaaggatattgaatatctttcatattgaataaggacatatctgcttttaccgcttgaacatccatattgaatttttccgcagttttaactaatcctaaagcagtagttccttcagtattggttttagcaatatgacgtaaatgtgctattgatacttgagaatgataattctttaagatcattgctaaacaagctgcaccacagtctgtttcatcgatttgtggaacataaattgatttatacgttaacatgcccatcatttatctctttctgcttagctaatttctctgttttataattatatctagcaagaaaatctttcatcattttcacactactacgtgaaaaatcttcaacatccccattaacaaatgagacacgatgctgtttcaaatcaatcgactcaatgttcttcggattcaccaaacaagactggttaatcttctctaacataggattttctttagcatattgattaatactacctaaaagttgcatttcacctgtcgtcaagatcattaataacttgtgcggggttatagttgttgaaatataaataatatcatcaatattgacattcctagtttgacgtccaattttatacgaaaaagtcattttcttcatataattgaatttgtgtaagttgtagatagctacttctacagtctttaccatcatctgtctaaatttatccaaatcagatgtttttacaatgtagtcaattggacctaatcgtcttctgaatgtaattaatgataagtctgcatgactagttacaaagataatttgagctcgttcatctcgctttttaattaaggcagccagatcaaagccagtatcttcttccgtatcaccgcctaattcaacatcaagaaagtagataccaccatctaatttatgtttcttcagataatcaattgcacccatgtaatcagttgcagatgcaattgaaaattcaatttcttcatcatctgacaaaatcatttccgcagcaccaagaattttcttagtttgctcaatttgattttgatcatcatcacaaataaatactggatattgcattttttatttttcagtcccactttcactatcaggcaaaattgttaaatcaaaagtaaaccacccatcatcaacatagtaattaacaatcattgaatcttcatatttatgagtaatttcttttacattcgctagtcctaaacccatatgatgtttcttggttgtataattcttttgacttattttatctgtcgctactccactttttctaacgcgatttcgaatttcaaactcgaaatcgccgttttcttgataatacattgcatctattcgcgcactattagagttacctgtttctttgatcaaggcctgactttcttctgcagcattatcaaacgtgataccaattattctgaccagatctaaaatattaacactatcaggaattcgagaaatgtcgtgttcacaatcgaaactataatctagacctaaactgtagagttttgataacttagcaattgcaatactttttagattgttttcatggatatgatttacgcccttatacttacgcaatgcttttttattaaactgtgtttcagtgtagtgatcgagaattttaacaacctctttagagttaccttcttgagcgcttacttttaaaccatttaaaacattttgataatcatgcttaaagcgacgcaaatcatcttcgtttttgtcaagataacttgaatattcccgtagttgtttcatttcagaactcaattgctgctgcttaagaatcaattccttgttttctgcttcttttgctttcctgtcagcgtttgccaattccagctgcaattgttgttccttttgctctcgtttggttagaagatctttttgaattttaacagttgtcaaataagcaaatacagaaaaaattatttgaagtatcaataaacttaaagatacttcaaataataccgtcatatgtgtactctgtaatgctaaaaaatacacaatggaacttgataaataaacatataatattaatccaataaatattgaattatttcgatcatttaaaagctttcgaattttcgaaactgtcaaatcttttgtgtaaatagttctttctcgtaaattgattttttaattatttatttaatcaaagtaggattctaaggtgtcctgaacctgaccaaagcctttatgaattcgattgaaataacggtcattgtagctcattgcctgaatgccaataaaagcatcaagcgactgttcagttggaaattctgccttaggcttagctttgcgcttgatcacattgttaaatgattcaatcatgttagtcgaataaattgaagctctgatctgcttgggatagttataaaagaccagcagatctggttctatgtctttcaagcttctgataacatggctgtaaaccttgccccatttggtatagaagtcatgcaggacagctgtggcttcttctttgtttgtctgttgatgcacctgtttgaattcgttcatgatcttttcacgatcgtcgacgcgtactttagcgcagatattgcgcatgacatgaaccaaacagcgttgaaaatgagctttaggataagtcctggccaaggctgttttcatgccaacaacaccatcagaaagaaaaagctcaacttgctttaagcctcgggatttcatgttttgaagcatctctgtccagacttcaatgttctcgctaggtgcaatgcagtagtcaatgacctccttgtgcccattaggcttgatgccaatggcaatatagactgcttcacgctcaaatgtttctcggcgcaaaggaaggtatgtcgcatccaaatagacgcagaaaaacttgtcgcttagcttgcgtttgtggtaagcctcaacctttggaatcatctgcttggaaatatttgatacctgagctggactgtaatggctgccatacatcttttcaattagatcggctatttccctggtggtcacgcccttggagtaaagcttgataatcatgctttccaagatatccgagtgctgcttgtagtcaggcagcgtgtgctgatgaaattgaccgttgcgatcccgaggcacttgcacttcaattgggccaaattgcgtatcaactttgcggaaataagcaccatttctagagttgccagtattccagccatttctggcatagggatcatagcccagaaaggcggtcaattcagcttctaacaagttattaacagcctgttgtagctctttgcgcaataaatcatttattttgtctggattgaatagagcttgagcaaaatctttggtaaaatcattcatgaaggagttcttctttctgtatgtgtttttttgttcaaaccaatcatacgagaaaggaactcctttttctaatgtttaaagaaataaatttaaggaatcattcatccttacacaaactattttacagtctcgaatttttaaataatacttttggattatacttatagttgcgatatctagaattaaaaaagtccaaataacactaccaacattaataccaaaaaataatgatattatttcaacgccaatagtcgtaagcaaatctaccatttcaaaaaataatattgcaccaatatttgactttatccttttatctctttttataaaatatgagaataaaagaatacatatgacttgaaaaatatctactacgaagtcatttattttagcggtgaagctagttgtaaaacaagctaaaacaaagaaaatcgtaaacactaaatcttttttttggaatttccaattagataatttataaaaaatacgcgtggtgctagttaaatcgttttagttaataaaaaagtccaatcggactagactcaagttgtagtatcaaaaagaaaagagtctgatctgattgaactgccttaagcttaagcgttttagccaccatttacaagttagttttaaagatttagtgataatttgtcggcactggtatcgtttgtatgcaccggctgagtttactcatcggcgaaatattgatcaaattaaaactacggacagtctgattttggctttacttatctggcaagctaagacaggaattgaatcacaaagaagattctgtgaatgtttcaattgtttatcacactcacgttttaatcgacgttcacgtcagctattgcaattgatttatcagatacggcaagaaatgaataaaaaggttgacctgaatggacagttcttgatcattgacagctttccggtacctgtttgccaaccaattcgcaactatcgtgctaaaatttttcgcggttatgccaacattggttataaggccaccaagaaaatttacttctatggtttcaaagttcatgtcattgttagcgatgacggttacattcttgattatgtcgtaacaaaagcatcagttcatgatgccagggagacagttgaactgatggaaaatacccatccatctaattactatcttcttggcgacgaaggctatttaggcaaagaactgcatcaacagctaaaacaaatgggttatgaactttggacaccatatcgtaaaaatatgacaggagctaaaaagcacaatgatcatcaattgatggctattcgcagaacaattgaaagcgacttttcgcttctgacctattacaatgccgagaacaatcgagcacgtagtctgataggctttcaaagccggttggaaattgcaattttagcttataatttggcttattgtctagaacgatttaactagcaccacgcgtataaaaaataaataaatctactattggtgaaattaatccctgtatcgctatcattactttaatccaagaaactttttccaattaaagtgaaacaatgggcgttttgacttattaacaatattattcattgcaaacaaattttgattaaaaaccatattagtaatagcaaatccacctttaacctcaactagctcttcttcattcaactttttcattatttatgcttcctttcaatttaatgcactaacaatttttacactgttaatgttactacgagcgcaactttatgattaaaatcgtcatattctgtaccatttagatcatattctgcattttcaattaaaatgctcctccaccagaaccatttccccaactattcgacttcttcttgaaaaaatagcgtttagattttgatcgtccacccacaatttagacatgaactagatagcttccgcatattttctcttcccttcatttaccattttgttacaaataaaagcataactctatctagcttctcaaaattaagctcatcagattttgcattatcctaatcatattttgctaaaaataatcaatcctctttctcctctggccaaaaaagatcatctaatgtcttatccagcgcctggcaaatcctgatacacaagttaaccgacgggttataatttcccttctcaatcgcagaaatcgtctgtcttgaaacatcaatctgctgcgccaaatcttcttgcgttaaatctttaccgactcgcgcagccttcatttttaaatttttcaatccttatcactttccttatcacgatggagttgaaacaggcttactgctccaataatcaaccaataaatccccataatgttcagcgcactgttaaagtcatcaatatatcctagaatcaagcaaataccaagtaaaatatatagccaactatttgccttaacatgctcttcattaaatgcaaaatatgctccatggactatatcgtaaactgacatcaccgttaatgacaacataataattgcaaagttaacagcaataccatgctttgtataaaaatccgtctgcatgaataaagcagaaattacttctccaacgattaacacaagaaagctatacctgtcaccacgaccacgaatcaattcctgtcgttcatcatactttgccgcacgacgatttcccacgaatacaacgactaagatgaaagtcataactgcaaacaagcttgcaaaagccattaattttaatatttcaaattttgacattttacacatccctttcttttaatagtttgatattaagcccatattttcaaaatgtaaagtatgttttacatttttactaataaatttgtatttataaaaactagcattaacataatcggtatcatttcactagatttgataccgattatttgttaatgatacctatttttcaaaaatttccttgacttcttcttttaatcgtcgtattataatgacaattaaattaataaaagcttagaagagatgagtaattacttaagacttctgcagagagtcggagttggtgcaagccgatgtggttgagagtaatgaatatggtcttggagctagtttaaagagcaagctgttaagtaagcaatttacgagtgacgatcgttaccccgtccgagtattcccaattttgggagcacttagtaaggagttagttgtgaagctaacttgaatttgggtggtaacacgcttaggcgtccctagcatagaaattctatgctaagggcgctttttattttgcttatttaatttttcagaaaggagccagacaatggataaacctatcaaaactacaagttcacaaatcatcatcagtaaaaaggcattcaaccgaatgtgcactattgtctggttgatcttgatcatcatcggacttttcatcgttaaataaaacatcgaagcaaaactaaggagaaaaattatgacagaattacattacgatatcgttggtagctttttaagacctgcagaattaaaaaaggctcgcgcagaatttgaagaaggaaagattaagcaagaagaattaactcatgttgaaaatacagagatcagagaattagttcaaaaagagattgatcatggccttaaaatcgtaactgatggtgaattcagaagaagttattggcatcttgataccttctggggctttgggggtattaaacacactaagcaggcccacggctatttcttccatgatgaagaaactcgtaacgactctgcccaagttgagggaaaaattaaatttactggtaaacatccagatctttcatcatttgaatacttaaaaaaggttgtcgatgaaactggcgctaacgtaattccacggcaaagtattccagctcccgcacaattttacgcagaacttgttcgtggagaagaaaatattgccgcacttaaaaagatttatagttcagaagaagatttactcaccgatatttctaaagcataccgagacttaattttagccttatacgatgcaggatgtcgcgacattaaactcgatgactgtacttggggtatgattgtagataagcgctattggaaaagtcatttacaagatgacttttcactagacgaccttaaaagaaaatacttgaagcttaacaatgatgcaatcaaagatttgccaacagatttgcgaatatcaactcatatttgtcgcggtaactatcactcaacttgggcagcccaaggaggttatggtccagtagcggactatgtttttgctaaggaaaatgttgacgccttttatcttgaatttgacaatgatagatctggcagttttgacccaattgcacaaattcctaacgacaaacttgttgtcttaggtttagtaactagtaaaaaagcagaattagaagatccacaaaaattaatcgctagaattaaagaagctgctgaattccacccactaaatagtctcgctttaagcacacagtgtggcttcgcctcaactgaagaaggcaacacgttaaccgaagatgaccagtggcaaaagatcaagttggttgtcgacactgccaagcaagtttggagctaaatggcaattaactagttaaaataaagataaatagatttagacaaaggagaaaaaaatcatgggaaaagttgaaagttttgaattagatcatactaaagttaaggcaccttacgttcgtttaatcactgttgaaaaaggccaaaaaggtgaccagattagcaacttcgatttgcgtttagttcaacctaataagaacgccattcctactggctgcttgcacacgattgaacaccttttagccggtcttttacgtgaccgcatcgacggctacattgactgttcaccatttggctgtcggactggcttccatcttttagtttggggcaccccatcaactactgaagttgccaaggcacttaaggagtcattagaagaaatccgtgacaacattaaatgggaagacgtaccagggacaacgattgaatcttgtggtaattatcgcgaccactcattattctcagctaagcaatggtcaagagatattttggctgaaggcatttctgatgacccatttgaaagacatgtggttgaataaaatttaaaggtttaactgaaaaatagtaaataattaaaaaagctagcaattcattttagtgaactactagctcttattttttcacttatatcatcccggcaactaagccaactatatacaagaagacacagcagactaccaaatacaaaccgccccacttgaccgtttcttttaggatctcgccttcgtctccctcacgattaattgagccggttgctactgcaatattctgcggtgaaagcatccctgccgtggcccctgtcatgttcgaggctacaacccagtacttacttacgcctaagtccgttgctgcagtatactgcaaattaccaaataaaacattagctgatgtagcagatcctgttaaaaatgttcctagtgcaccaattaacggcgcaaacaatggataaactggtcctaaaaggccaaccaaggccactgctaatgcattcgtcataccagcataaaccattaccttagccaagcctacaatcgcacaaactgtaattgtagttttccatacgctttttatcgattgtcctaatatttgcatcatttttttcaagctgacaccctgaatcgccccaccaattaatgtagctacaaaaattaatgttccaggagaagataaccaactaattgacaatgtatttgggttctttcctgtataaacaacaagattagtggttactttattaagtacatcattgacagctggaactaatgaagaagcaaagatcacgaagataaagaccaaaataaatggtgaacatgccttgagcatttccttagcatttggacgtaaaacatctggctcttcttcatcatcatgccatctagttaataagactgtaatcgcaattgaacacaatgagccaacaattgcaggcaattctgcccctacaaattttgcagctattacctggggaatagccattcccagtcctgacatcaatgtaataaagcctacacctttaattgccttaatgctgccttcagtcaagataactaaaataaatggtaccagtattaccaaaatagataattgcaatgttacgatgaaggatagtttttcttgatgtagacccgtcacttcagctaaagttaaaactggtaatccaattgcaccaaaagccgtcgcagttgtattagcaatcaaactaatgactgacgcgcgaatcggatccaagccaaaggcaatcaatattcctgccgcaattgctaccgcagtcccaaagccagcgattgattctaaaaagccaccaaatccccaagcaataatcaaaacaataatccgcttatcggttgaaatcgtcgccagcatattttgaataatttccataccgccagattctgtagtaacgttatatgcaaataaagccatgacaataacaaacataatcggccaaatgcccatgataatgccttctagcgccccacttgccgtatctagcaccggtactttaaaactaaagactgctaacaccatcgtcaaaattaagccaatgacacaagcgcgtgcagctggcattcgcataactcccagcgaaataatcaaccaaacgatcggcaacaatgcgatcgcaaatctaatccacatcaaaatcctccatcatcaaaagtgttgtactatattatttaatcatgatttgggtaaaaagttaaaataagacacaaaattttagtttaaattacaattttcacaaatttcacttgcaagtttaaccaacaaactatataacaattaatggaaagtaaaatttctcacatcatgtttgaactactccgtggaatagagtagttctttttttgcgtaaaaaaatagccagaccgaattcagcctgacttctgttttttttagcgatgtttaattacgtgaataccataagcgattaagtaaattaccacttcgatcgttgcaataaagaaagttaccggccagttggtgataaagccgagatacagtccagcccacacgccaactaaagcgaaaaacacggaccaactgatcattgctggtattgttttaccaatatagcgcgccgttgaagatggcaatgttaatagaatgaagactagcaatgaaccaacaatctgggcaccgatagcaactgacatagccaaggctaccaagaaagcaataccaacccagccagtatgtacaccatgtgcaacggcaccgatatggtcaaatgagtcaaaattcaagcttcgagctaccaaaataattaatagtaaaactagaattgacaaaaccactagctgaatcacgccttgtttatcaacaccgatgatactaccaaacagaatattagtagcgtaacggctatttgatccagaaatggctaagaacagcacacctagcccaataaacagagctgagatcgcactaactgacgattctttttgatcgctgtgcaaggacaattctcctactccaattgaaccgagcaaggtaaatagtagcatcccccataacggtgcaatgccgataaagacggcaaaagctgctccagcaaagccgatttctgacagtgtgtgagctaaaaaagcataactccgtgctactacatatacaccgaccacgccacaggtaatcgcaatgaatgtactagctaagaaggcataacgcataaattcgtattgaaacattattcgaaatcctccttaaatttatccatctttccttgcctgatcgttcccttatttaaatatagataatcagtcatatactttttagctaaaggaatatcatgagtgacaaacaaaacggtaattttgtgttcacgattcaggtgcttgattaatcccatcaattcttccttagcagccggatctaggctagctgttgcttcatctaagatgatcatattgggatgatcaagtagagcctgcgctaaatatgcacgttgtttttgtccacctgatgcctcacccattcgggtattctgaatcttttctaaatgagtttcttctaactgatgatcaatctgttccttaacctttttggtcttaaacaatggggcgttaagtccaataaatgcacgaatcgacaatggatactccgcatcaatatttctaaactggggtacataacctaacttaacgtctgaatcaaacttaaagttgcccgcagtcggctttaacatccccattaaaatcttaattaaggtggtcttccctgttccattaggtccaagtagtgcagtcattgacccgtcttcaagctgaaaactcaaatcttgaaaaacatctttagtatcaaatctcatcgagagatcatttacttctaaaatcactcttctaccccctccctaagttgctattatttttctattttagccaaattttgataattttctttcatccaagccaagtaagtagtgtggttaggaatagtctcccgcacatttaacactggaatattattttccttagctaattttacaaataacttcacagttgaactgcttgcctgtgtattgttaacaaagaatgcaatcttttttgctttaatttcattattcatttgattaatcatcttaggactcggatcagtaccattctcaattgcttcttcaaagcccttatccccaatcttgtatcctgcttctcttaaagcataatcaaagacaggttcactaacaaagactggcttactatttttcttattagtcttcaccaattgcttaacttgattaatcttagctaaatacttgtcaccattagctttaaaataagctgcatgctttttatcaagcttagataaacgcttaactaggtaattaacatacttggttggcatacttagattgtaccaaatatgcggattatcccccttctttaatcccatcaagtcttcaccaactaagacaggctttttgctaacagaactagctagcttattcatccaagaatcatagcctaagccattagcaacaataatatttgccttggtcaattctttagcatctgccgtagttggttcaaaatcatgaggatcggtactgctattgctaatgattgccttagccgtaccatattttcctacaacatttttagcaatatctgcataaacattggtggtggtaataatcgagacttcacccgaattgctcgtcgaatttgatctattcgagcaagctgaaactaacagcgcaataacgccaattagtcccaaaaaagagattaacttcgtaattttagatttcgcattttgcataaaatatcctccttgtgcaaaataaaaaagcatttaagttagaaaattcagcataaattctaactaaaagttagaataatctagttaattacatatgtcaacatatttttgcatagacaaatagcaccagtctcccataagcctgatgctatcaataatttaagtcataaaattttgctgaattttattaaatgctttgttctaaaattacattattatataaacatatttttatataattgtcaaactaaattaaaattcttccttcacgtgctgacgcaaaacatctaagattttaatcacatgcttatcttctaagctataatagcgctcctgcctaacccgctcgctcttaactagcttagcctcttccaaaatacgcaagtgacgcgaaatagctggctgactaacatcaaactgcttaactaaattattaacactacttttttgattatcatttaaataatataagatttgaattcgaatcggatgattcaacgctctagtaatccgaataatttgctcgtccaatttcttcacccattcatactttttaatttattatagcttaaatttaggtataaaaaaacgctacccttcgggtagcgcaaaacataacagagtatcttgatttaagtagagatcatcaagatatttatattataatacgtttttgccaaaatgtattgttttttgattaataaccagaattatttaataataatattcgatattacttatagtattattcgtttgggtcttctttgacattcttcttccagaaactcatgattaaaccagcaacgattgaaccaataatagtagctaggaagtagaataagatgtggcttggaccaccgatgttaccagcaagtggtgatacccaaagaccaccgtgaggagctgggacaccaacgtgccataaaccaactaaagcaccaccaacagctgaaccaatgatacatgatggaattacacgacctgggtcagcagcagcaaatggaatagcaccttcagtaatgaatgagaagcctaatacccagttagaaacacccgcacgacgttcttctacagtgtacttgttcttgaagaatgtagtaccaattgcagtagcaaatggtggaaccataccacccaccattacagcagccatcaagatagcagcagtagctgagtgagggtcgttagcaaatgcacctgaagcgaagacataagcagccttgttgaaaggaccacccatatcgattgacatcattccggcaaggatagtggtcaaaagtaccaagttaccagtacccattccgttcaagaaatgagtaatagcaaagttaatgccactaaagattgggttaatgatgtagaacataattgctgcaataaagagcaatcctaaaattggatagaacagcattggcttcataccttcaacagaacgaggtaatttagcaaatactttcttcaaaccaaccatcaagtaaccagcaataaaaccagcagcaataccgcctaagaagccggctggtgaagttgcgtgagcttgaacgttaacttggaattgaccgttaacaatagaggccatgtaaccaccaacaaaacctggcattaaggctggcaaatcaccgattgattcagcgatataggctgccaaaactggaaccatgaaggcaaatgccaagttaccagcattgtttaaaaagatgaaagcaggagtcttagcgccacccatgtagttttctacgatgaatgagatggccattaagataccaccaccaataacgaatggaagcatgtgactaataccattcatcaagttcttgtagatacctgcccacaaacctggcttctcagttgatgaagattcagttgacttgtcttgagcacttgcacggtaaacatcagccttaccacccataatgtcatcaatcaattcgcctggcttgttaattccatcaacaacaggacggttaactaagtgcttgccgtcaaaacgtggcatatcaactttcttatcagaagcgataataacacctttagcacgcttgatttcatcaggagtcaacttatccttaaccccttctgaaccgttagtttcaattctaacttcgatgccgcgcttcttaccttccttaatcaaggcttcttgagccatgtaagtgtgggcaataccgttaatacatgcagtaacaccaacaatcaatggcttgttgtcgtcatcacttgtaccttgagccttagcagcttccttagccttcttagcttcagctgccttcttgtcttcttcgtcttttttagcttcagccttttcaaaaagatcgataacttcttcaggagtcttagtattcttcaaagcttcaactaaatcaggatcaattaacaaacctgaaagttttgctaatgcttgaaggtgagtattgtcagcaccatctggtgcagtaatcatgaagaataagtgaactggttgaccatcaagtgaattatagtcaattccttccttactcttggcgaataatacgcgtgccttgttaatagatttgttacgtgcgtgaggcatcgcaattccgccaccaataccagtagttgattcgttttcacgtgcccagattgacttaataaaagcatcttcgtcgttaacgatatcagttgctacttcaaggtcagccatttctttaatggcatcttctttgttcttagccttaagctccataatcatggagtcagggcttaaaatatccttgattctcatatttttcccctcgttttttattaagaaatttgctcaactttgatttgtggaagaacagcatcaatttggctcttaactgcaatgtccttagtaaaggcagtagcagcaccacaagccattccaattctgaagccttccttaggatcttgggtcttgtagtaagtaccaacgaagccggcaatcattgaatcacctgcaccaactgagttaacagcagtaccaacagcacccttagcatggtaaacatgatccttggtaagaaggaaaccaccttcaccagccatagaaaccatcacattttgagcacccttatctaaaagcttttgtgcgtattcaagcatcacatcacttgaatcaaaagttacgccaaacaagtctgctaattcatggtggttaggcttaattactagtggcttatatgccaaagtatcaagtaaagcttgtccagtagtatcaacaacaaattctgcacctgcttctttaatagtaggaagcaatgattgatagaaatcagttggaaggcttggagtaagagaaccgctcattactacaatgtcgcccttctttaaatcgtttaaacgatccttaaaagcagtgatttcttggtcggtaatgttaggaccagccgcgttaatttcagtttccttttcagcgtggatcttaacattcacacgagtgttatctgaaatagtaacgaaatcactttcaattctcttttgattcaattgacgaaccaattccttaccagtgaagccacctacgaagccccatgccgtattatcaacatttaattggttaaggatttgagaaacgttaattcccttaccccctgctaaaaatgaatcattgttagttctgttaacttctccgcggttaactttttctaattgaagaacatagtcaagcgctggattaacagttactgtataaatcatcctattttgcctcctctaattcaataccgactggtaatgaccgtttttgacctggttttagttgatcagttaccacaatcacgtcacttgtattggcaaacacagcaaagttacgctcaccgattttactattatcagttaatacataagcgtgtcttgcctgtttgatttcggctgccttaaccgcagcttcctctggatcaggtgtagttagattgccatttttttcaattccattagcaccaacgaagctagctgaaaaattcattgccttaatctgacttaaggcggtctgacctataacagcatgcgtatcgtccttaacttcaccgccaattagaattgtgttaattccgtgatttaaactgcataaagcagtctctacaccattagtaataatcttgacgttagcaacctctgctaaaaatggtaccatctcataagttgttgttcctgcatcaatgaagacattgtcacctggacgaacaaaattctgcacggcatatctagcaatagtgatttttgcgtcatgattcaaactgaagcgaacgttttgtgatacatcacgagaaaaatgtttaactgattgggcaccgccatgaacacgcttaaggatcccatttttttccatctgaattagatctcgacggatagttgattcagatgttgcggttaagtcacataattcacttacgcgacataactcgtgttgattaacatagtcttcgattaagctttggcgctcctgagtcagcatcatttctcacctcgataaatattgtattcgctttctcctccaaaatcaatcatttttcttcaaaaaatgtcattcttatttattatcgttcaataacattcatttatatgcaaaaaagatgccgttttttgattgaaacgacatcttttcttcgtcatttggaattattcttagtcgttttaccctatttgactaagaatccgtaaagatgactaagaaagagaaccaaagatctattaaccttgcaaaagcaaaacacgctgaatcattattgattcagcgcgttttactattaaatatattttgtctagcctctcaagctacgcttaaagttttgccatgggccgacatcatctgtttgcaaaatcaagtttggatagatttttctaatccagataaatgacgctactgtagcggctaaagcaattaaagcagagatagctgcctctaaattagttgcgttacccataattactctagctggcattacaaatgatgatagaaacgggatgtacgataatactttagcaaaaatcgtatccccacctgattgcatattgactgtgaacaagaacccgatcaacatcaatgtagatagtggtcccaccgctttgttggcattctcgcttttagcaaccaaagcgccacagaaagctgcaaagataataaacaataccaagccgattatcgtaaacaccaatccccaagaagccagattgccaattgcttgatcaatcatcggcttatactgtctaaataaatcgctaaagccatcgatgtatggggccgcgcaataaactgccacaaaaccaacaacataaattaacacttgggtgataatttcaccaaaaatacctaaaatcttcccagtgaaataatcgccacctggcatactcgaaaagattacttccattatcttggtacccttctccgtagcgatatcttgtgctgttacttgcgtataagtgatcacaagcatgtacaagataatcagcaaaacccagaaggaaatttgcttaacaggatcattatcaaagctcttcttatcaacatgcttaacttgttgcttaaattgcgctcgcgtagctaaagactgagtctgttttgtcgttagcttggccttacttaaattcaattgttgctgggcggtgtttaggctagttagcagctctgattttagatcactgtccattttttcatcactatagtaagttgcagctaattgattattcttttgttcaattaaaacatagccatcgatatcttcatctttatacgcctttttagccttagcttcagtgctatagttgtcaaagtcttctgactttttaattgcttgctttaaggcagaattagaagtaactaccccgacatagttgtcatcactgccgccagctgataccattccgataacaaatgaaaagaagacgagcagaaacggtgctaaaatcatcagcaaatatgaccaagttttcacttctctacggtaggtttcttttgcgacaagccagatcttattcatgacgcgcacctgctttcattttgaaaatctcgtctaaagttggaggttcctggtcaaaagtctggatatattgaccggccgaaagttggttaaaaatatccttaccatatttttcgtctgcaagaataagcagcttcattccattgttttgcaaaattatatcttttacacctggtaaggctgataattcagtagcacttttgtctgtcctgacaaaaattcgagttaggccaaagctgttcttaatttcatttactgggccattcaagacgatatgcccatcattgatcattacgacgtcatcgcacaattcttccacgttacgcatatcatgatcagaaaaaatgatcgtagcgccttttcttttttcttccaaaatcagctgcttcattagatcaacattaacaggatctagtccactgaatggttcatctaaaataatcaatttaggttgatgaattaaagttgcaatcatctgtactttttgttggttacctttagacaaagacttaatcttatccatggggatccctttaacagccaaacgtgataaccaatcaggcaattcttcttttacctttttagccggcatccctttaaggctagccaaaaacactacctgatctgaaatagttaacttaggcatcaaacttcgctcttcaggcagatagccaatattgtcataatctttagcgttgaaagaatgtccatcaatactaatctggccgtcataatcaacgaatttcaaaatactatgaaagatcgtcgacttacccgacccatttttaccaaccagtccaagaatacgcccatctgacacactgaagctaacatcaaacaaaacctgtgttgacccgaagcttttatttaggtgttctatttttaacataatttttcctcaactttttatctaatggttattagacctagaagtacaccgtcaaagaactgccataaagtatcggttgaaaaaattgtttttacaatatcaactgacccccaattggttactaaagtaatcactacaccagctgaagcaaccactactcctgtaccaataacttgaggggcaagtttcaacactttcttctgccatggaatctttgatgcgaccgttttattaaggactaagcttgcggacatgatgccaccaaacattagaccgaaagccaatccggctccaatcgacataataatttgaaaaggttgaggcgaaccagcagtcttaacatacatcatcacaagagctaatattggtccaacaagtgctccaattcccatgccttcaataattcgtttgttttcacgagcaaatttttcattattcattgttcttacctcaaggaaattttcagctaattaaacaaatccgaaaacttagtcggaatgttgttcttggcgaagtatttcttgaatgcatccccaaaactcaattgatctttttctctattttcaagcaaatcatgaacagctaagaatgctgtaacggcgtaattaacggctaaaatgattaacaaaccgagcacaatataaattaagtacagcattgttctttcctccaattcagcgattatctcccaggaaataatcttttatccttttaaattaatcatatccccatcatttatgtaaaaggtaaaaccgtccaattctgtcatttttcggactgattttgcattttattcttcatcttttttataaactaataaatcccctggttgacaatccaagacttcacagatcttgctcaacgtgtcgaagcgaacgccatgcgcctttcctgtcttcagaatcgacaggttagccggcgttataccaactttctctgccaactcctttgaagacatctttcgcttcaagagcataaaatctagtgtcacttcaatcatctatatcaacctttctaaataatcgagtctgcatcctcctgaaccttcattccgtacttgaataccaagtagactacgtatagtactgctaggaaaagcaaaccagttgtcacaccacttgggtatagtacattattcgaggatttagcgaaccaagtgcggtgagttatgaaaataatgtaatctattattgaaataagggtatatccagcaactgaaattaataatttcttgagtaaattcaaattactatcagcaaagtaaacttcttgcttgatattcttaacaattaatctggcatatcgacagattaaaaaggctgcaacgctcatcatgatcagtgatagcaacacaaccactattgcaccgatatagttatcaactgatacgccttttatacccctaccactttcaaagccagcacgaaaatccggattatgtataccaaataacacaacacctcccataacgatccacataattattcctatcacacaaaatatttggtaaatccaagcaaaaatcgtaagcaaattcaaaattaattttttcatttttctatcctctcaaaatatggatgattctgtatatagcactgccaattacacccgttactccaattactaataatgtaattctaagaacactccatgttccgcctaagttagcaaacactaagattgccatcattatcagcattccaataattgaacctatctgtcttttcttttctggaagcatatctatccctctcttccataaaactatctatctctttctcgtcttttataattattgtattacgataatttataattgcaatacagaaataaaatatttttttgagataataaaaaaataccaaattagtcgttaaactaacttggtattatgttttatcttccaagctactgctttttacttttcttcttatagtaagagttcatgaaaatattcataaagataacaaaggctacactttcaactatattccaaaatactgttccaaagcttaatgttttgtactgaaaatagtcccataccaatcctattaacagggccaaaataccagcgatgatacttctgtttctaacttggcgctcggttaaaattttatttttcataatttttaccccattattatcatatcgaaaaataggaaatctattaaccgaattttctattttttaatattatctatgtttatgttttttatgtctattttgtttggcgaaatctttaacagcgccttctacacatccttttatcataccacttccgctagggagcgcatcaatgaaacccgataaacatgatccacctacaccaagccagttagtgccaccacttactttttctaattctttataattcatttctttcatcataaaagttacctccttttttacaaatgtgatacacaagaaactgatccgctaataatacccacattagcaccaaatatagctccacctactgtaccaattggagtaccaaatgcagtgcctgcaatgccatattttagtccatccttcaacgctcccattccaatagctttagcacaatttgtgatttttctacggcgtcttgctttaccaccgttaccaccgaaaacagctgacagttcttcataagttaaagtttcaaatttgttcatgtttttcccctttataaaacttctaattacaattttcataagtgaattaagttttacctctcttcaacttacacactaataatacaaaacaatttaccttcattggcgtataataccgatttagcacgaaacaagatctatttggaaaatatttaccaaatcggccaagttttcgtatattagtaatttacaaaggattcttattaattgttacgctaacttgatattctgttttataaatccgaaaactagtaaaaacatagacacaatgcacttattatgagaatggctaacaaaaaaatcttctcatagccaaggctacaagaagattgccatcacattaatgcataaactgatacgcacgctctttactttaataaaacatgatcaattatacgactataacatagccactcaaaaccaaaaacttgagtcgaaatcaaataatcatttttagcatagtaacctacgaaaaaaatcacaagtttcataggtttctttgcgttatcttctaagtattacgatattttctattggagatatttttagcctattcgcaccagtatttttttcaatacttatctactagttattatctacctctatgaaaagaactttggaaaaacttaggattttccaaataaacgtctcgtttatgattaccacctttcttactgtataaaggtagcatgtgttcagtatcagttagaccaatatcatctacagaacctgacccacctaaaattccgcttaaaagtacttcatctttagaaataatgattcgtttcatctacttttcctccttagttttctttcctaatgaaatgcccaaaactaaactgattaagatactaatcattccaattaattgaccccagatattatccttctcacctgtagatggtaaagactgagtagaaccatttttaatagtgtcattttccaatcgctttaacttagtaattctattttgattgttcttaacggcactataaggcttgctttgcacttttactgaatcaaattgtttattttctttcacacttccgtgtttttcactaactgctgctagaataatattctttttatgcgatttagctgttttcttgaccttagtggctacgattttaggttttactggcttcttcacagttttcttcttagtttcagctctaggagccgcatactcttgattacctgtcgtaactttagtcagatctgcagtagagctagcaacatttgcagcattctcaaatacgctattttcaacaaagtcagtaatagcaacgtcattgctagactgtgtttgatcatcttcagctacagtcacttcaggtatttcattactttcagattcagtagtattatcatccttcggttgatccttaattactgcctgttccactaatttattagctgcatcagaatacaaaaagttatataactcttgtcccgtcttttctccaccgacccatgcactaataatttttccattaataaatctcattgtagttggagtacctggaataccaatttctttgaaggcatactcatgtgctccttcttcagcatcaatattgaaataaagcagcttacctttaacgatttcattgaaatcttttaaatcaggtgaaaattgtcgacagtagtaacatgttggacgaccgatatacataagatgttcttgattatttttctctgctagaagatcttttacttcttgcatttttactctatgaaaatcttttacattgttctcataatcttcaacagatacctcatcttcatcatcttcactatcttcctcatttgcattattaggatcttgattattagtattctgtgactgattattttgatcttcagaagctgctggctcttcttcctgcttattttgagtttgagctgcttcgttcttactactagttttctgctcagattcggaaacatttttatcatcattttctgttttagatactacttcacttttattctcttgagaagtattaccttcatccgcatgcacaatagtactattcatcatcaataatactgctgggctcaacattaacattaatatttttttcttattcatagatcttcctccgtattttttataactaagaaaaatatatcaattatcagctatctttttggttatcagacttattcagtacactttttgaccaaatcagttatcaaaataattggaatttgattctaactaaaaaagagcttttcagctccttttaattttggttaagaattttatccttaaaatattcaaaatatgtactcttacctgtaataatagttgcgttgccttccatcccatatttcaaatttttcttggacttggccttacagattacttcatagacattatttccgcgtagattaatgggatatactccaatttctttcacttttcctactaatctatccattgttccactagcattagctacctgaaaatacagtgtttggcctttttttattgccccaattttattacctgggaaataagtaactacattgaccgttcttttagccttaatcatcggaaacaagtgaactgtattctcctgtttatcatcaagatgaactagccatttttctctatttcttctaacaatttgtccttcatgatagtttctattggcaatattaagtgtattttgtggttctacaattccggtagatgtaactgtactttgtctagttgcaaagaaagaaccgactattaagatcagaactaaaattgccataggaataataatcatagttgaaaaattcttgaatttataggaatagtattcggtactctcatagtctttattattcataacgttgctcctaattctcaactaagttatagtaaaagccatgtttctgcattaatttctcatgacttccttgctcaacaatttgaccatgatctacaaccacaatattgttagtcctttgtgcaattgctaaacgatgagcaataaaaataatcgttttatcttttaatttcattaaattatctactacttttttctctgtaatcgtatcaagcccgctagtggcttcatcaaaaattaaaattttagccggtgacaataatgcacgtgcaatagttagcctttgcttttgcccaccggataaaatcttggcattttcatccatcttggtttcaaactgcagtggtaattgttcgatttcagactcaatttctgctatctgacaggctttcaatatatctttttctgtaatatctggtcgactacctaagagcagattttctttgattgttcctgagaagatgtatggtgtttggggaacatagtttacgtatgaccgtaagacatgcttatctactttagtagaattaaatccattaaaagttaacttgcctttgcttggagagaagaaatcaactaaaagtttgaccatagtagacttacctgagccactcatccctacgattgccaacttatcattgggttcgatttttaaattaatatctttcccggatttaaaattgaagtgcaacactaagtgttaaacaaaaaggccatgaagacctaaacttgaagtgacgaaaaatcaagaaaggaagatcttcatgaccaattcaaattctagcatttctaagcactatcatcaattaaccagcgtacaacgtggacaaattcaagcaatgctggattccggcataacttcccgtactgttatcgctcaagaagttggctgccataagtcgacaatcagtcgcgaaatcaaacgcggaagcgtcctgcaaagagacagcagctatttattgtatgagcactattacgctgatactgcacagatttattatgagaagcgtcgcaaaaactgctatcagcgcaatccattgaagcattatgctgtctttttgagaatgctctccagacgctttaaagctaaatttgatgccaccagcatcgatgagttcgttggtgaattcaaaaggactatgccaggctacccttgtcccagcacaccaaccgtctatcgctatattgatcagggcttgctggacataagcaatattgatctgcctatgaagctcaaaagacgcaggaacaagcgtcatcacagccatggcggtcacgctttgcacaagaagcatcttggcaattccattgaacagcgtcctaaggaggttgaagacagaaaagctccgctgcactgggaaggagatctggttaaaggcgtcagacgcaagaatcagcctgctttaatgactttgactgaaagaaccacacgctttgaagtagttatcaagattcctgactatcgggcaagcacatgccaaaggctgcttcaaaaggagattgacagacatcctgcctggtttaaatcaatcacgtttgacaatggctctgagtttgcggatatgaccaagatcaagggctgccagatttactttgctcacccatattctccatgggaaaggggcaccaatgagaactgcaatggtcttttgcgtcaattcttccctaagggcaagagcatgaaagacaagtcaaaagcttatgttcaacaggcaactgatgccattaaccacaaatatcgccgaatcctccaatatcacacagcagaggaactcttcaagcaatatatctcttcataacctaactgttgcacttaatttgacaattcaggaattaatatcttttaatacatcgactccatagccataatgatagtcaacatgatgatattcaatctcacctgctaattgcttggcatccctaatctgagcatctttctggaactcactcttaaccatgtatacttcattcaatcgattttgtgctacattagctgattgtagagttggttgaagattaataatgctctgaagtggatctacaaaatacgatagtaatgcgttgaaggtcattaattgaccaatgctcatctgcccgttcattacaaccttagcccctacccagaggataattacattgagagataactgaatgaaggtctttaaagctgactgcaaagattcagttttactgtaacgaaaagatttcttgaggtaatcgacgaattgactatcaatcttacgataacgtgtttgttcgctatttaaagctttgattgtttcaattccttgaatatcttcaattactgaagaacttaagacagcattactctccatctgatcattattcatcttttcaaatttcttagaaaagctaagaatcaccactgcataaattggcaaagacagtagagtaatcacaaatagagtggaattttgaattgccaaaactattcccatcacaattacaattgaaagatcaagaaataatgaaataactgtactggcgagtgcgtcaataattcgactagcatcagagaaccttgaggtaatttcccctgttctacgagttacgaagaattccattggtaattcaaaaatatggcgaatgtattgtaagttaagatcaatacttaatcgctgacctagaacatccaatagaaaattttgcccgtaagaaaagatagagttgaaaacatatgctatcaataaaccaatagctaggatcgacaaagtttggtatgtaccgctaggaatataagtatcaattaagccttgcaagaagtatgagctacaaatactaatgattgtcatcaaaagagcagccaaaataatattagtgactagtttcttttgtttgaacatgtatggaaatagtgaccacagattttgctttttctctttgagtggctcaaaatcatcatttgggaccataaaaagggcaattcccgtccattcttgagaaaacttttctttagacattttcgttaaaccaacgctaggatccggatcagcaatcactaaataatttttggttgccttaatcacaacataatagtggagtaattcgccttgctttaagacgtgtacgatgaaaggatattgaatgtctgcatcaggatcaaacaaggacatgtcagctttaactgcttcagtttttagattaaatgcttgtgctgttttaactaagcccagagcggtagtcccttctaaattagtgcgggctgaatgacgtaaatgggctaaaaatactctagaatgatattttttaagaatcatagctaagcatgcaactccacaatctgattcgtctacttgtggtacataaattgatttatactgtagtaacatcttttccactcctcatattaagttgaatccattatttcatgattggaaaactaaatgtaaaaaaataccaaatcggttattctcattaccgattcggtattttagttttctaactagattgagctactcaactttaatattttcaaatttatctacaagctttttaaccacggctttatacgatctagaataagttaccatctgaccattatcaaatataataatgcgttccttcgtgtcaattgcactaatgttcttaggatttaccaaagaagattgcgaaacttttgccaagaatgggttttctttatcaatctgagtaatatttgccttatactcaacttctccattctcagtaaccatatgtactttatgctgtgtagtactgtgttcaatgaaaagtatatcgccttcggccactttacatacgcgccgaccaatcttataagtaaagtcacgttgactaaacttaattctgttagataaattatcgaaggcgttacgtaacgtttcttcgatacgttgaataatcttatcagacgacatagacttactaatataatcaattgcaccgatacgacggcgatacgttaatggagcgtacttatcgtacgccgttacgaagatgatctgggcattttcgtcattcttcttgatgaattcagctaaatctacgccattcttagctttagactctcgacttaattcaatatctaagaagtagataccattcttaatatcatttgtgactatgtatcctaccgcttgagcaaaatcgttagcaacaaacgtaacagattcatttaattcagcgtaaccttcattatcatctattaagtcttgaatagatgcattgatattcttagcaatctgattagctaaatctttatcgtcatcgcatacaatgattgggaacttactcatcctcttcaccatcttccgtatcaattgtcatataaaagtcgaaccagccgtcttgaattgtataagaaatagacatatcaggatatttactctcaatttccttaatattagctaatccaagccctttatggtctttcttagtagtaaagccacgttgttgaatttgactagttgagatatttttattttggattttatttctgatttcgaactcaaattcatctgggtcatcagaatagaccattatttggacttcagcacttcgaatatcatgcttttcggcaatcaatgctttactttcctcaattgcattatcgaaagtaatgccaataatacgtactagatcgagttcatctacatggtctggtaaattacggatattatttcgacattcaaaattatatggtatatccaaattatacaattctgttatctttggaataataatgctcttaattgatttaacgtaaatgtgatttaggtctttatatttaagtaaggctttagaatttaggttagtttcagtatatttatctagtttctgaattacttcttgaacgttaccttcttgcgcacttacctttaaagaattaagaatatttttgtaatcatgtctgaaggcgcgaagatcatcttcacttttttcaagataagaagcatattcttcaagctgatgctgctgttgctttaatttttcttgatcctttttatttaaaagtttttcttgtaccatcgtcatttcatgatatataaatatagcaaaaatagtttggataagaatatagagagaaaagaacaaagttaatggtgtaaaagatttgctttgaatatatatgatagagatgctcaccgtagaaacataggtataagctaatatgcctacgaaaattttattattttggtttgctagataattatatatttttccattacctagttttattgcaactatcatcattagtattagtaagaaacgtagtgataattggcctatcaaagtaaatgacataacctgagtgatcatatcagacacaatatcaactaataaatctaatgtgcatactaatattattgaaccaaatagtatttctaatgtattattttttctcaaatataatacaaaaagcaaagtttcgaaactgtcaaatcttttgtgtaaatagttctttctcgtaaattgattttttaattatttatttaatcaaagtaggattctaaggtgtcctgaacctgaccaaagcctttatgaattcgattgaaataacggtcattgtagctcattgcctgaataccaataaaagcatcaagcgactgttcagttggaaactctgccttaggcttagctttgcgcttgatcacattgttaaatgattcaatcatgttagtcgaataaattgaagctctgatctgcttgggatagttataaaagaccagcagatctggttctatgtctttcaagcttctgataacatggctgtaaaccttgccccatttggtatagaagtcatgcaggacagctgtggcttcttctttgtttgtctgttgatgcacctgtttgaattcgttcatgatcttttcacgatcgtcgacgcgtactttagcgcagatattgcgcatgacatgaaccaaacagcgttgaaaatgagctttaggataagtcctggccaaggctgttttcatgccaacaacaccatcagaaagaaagagttcaacttgcttcaagcctctggacttcatgttttgaagcatctctgtccagacttcaatgttctcactaggagcaatgcagtagtcaatgacttccttatgtccattaggtttaatgccaatggcaatatagactgcttcacgctcaaacgtttctcggcgcaaaggaaggtatgtcgcatccaaatagacgcagaaaaacttgtcgcttagcttgcgtttgtggtaagcctcaacctttggaatcatctgcttggaaatatttgatacctgagctggactgtaatggctgccatacatcttttcaattagatcggctatttccctggtggtcacgcccttggagtaaagcttgataatcatgctttccaagatatccgagtgctgcttgtagtcaggcagcgtgtgctgatgaaattgaccgttgcgatcccgaggcacttgcacttcaattgggccaaattgcgtatcaactttgcggaaataagcaccatttctagagttgccagtattccagccatttctggcatagggatcatagcccagaaaggcagtcaattcagcttctagcaagttattaacagcctgttgtagttctttgcgcaataaatcatttattttgtctggattgaatagagcttgagcaaaatctttggtaaaatcattcatgaaggagttcttctttctgtatgtgttttttttgttcaaaccaatcatacgagaaaggaactcctttttctaatgtttaaagaaataaatttaaggaatcattcatccttacacaaactattttacagtctcaaagtttcaagtatatttgtgaagattacgccaatattacctatagacaataacaaccctaaaaaaatattagcaatacacaaaaatagaatctgtctctttttagatcttactcttgatattttaaaaaaacaccatacatctgctaaactagaaaaaacattaagaaaaagaaataagactatcttttccatatattattccaaagttttttactcaagaaattaaaaccaacatgtgccgtgcttccaccaacaaccttagtcaattcttcttccttcaaaacagtctttttaacattttgcttcttcatgatatttcatcctttcatgattttatactcaacttgtttacacctttaatatatcatgtacttttaagtaaattaaaaaagataccaattcagtcatactttcgtaccgatccggtttcatatttcttcaaacgtaaacaactgacaattaattttcttagctaattcctgacagctatccgtaaagccagatttggaaaatagataataatgcttaagtggatacttgaagatttcactatttgtaatcaatttttctaacacactacgagagatcggttcattcttccatttacattcgccgaaatatccatcacgttcatcgtcagagaatcctacaatatctaactcaacttgttgatgtgttctcttatcggttccccaccaattgcccaagtggataaacggattaggaacaattttttcattcatatcctgagaccacatgaagtcttgactgtatttttcaaactcaggtcccatgaaatcagatagacccttttgtacttttacccaagcaagatcagttaagccacgctcaattagatcggtttgcttgccaacaaaggtataccagaagcggaacatcccgtcacagatacgataaacgatatttttgcttttactcttcttttgctcagtaaccggtaactttttctcaacaatacctaaatctatcaaattattcaggtacgtggttagcggaccagtttgtaagtgggcggattgcgcaattttactatgcttagaagcacctgaagctatcgcattgataatcgaattatagttagttggatcgcgtaattcctgttgtaacaagttattaggctcatcaaataagcgacctgatttactcaaaaagtttttcttaatattatccgcaactgacatgctgtctgacatataactcaaatattggggtacaccgccacaaaccgtattgatgataaaagcgtcctctttactgagttttggtaacatttcatgtgcttctgataatttaaatggttcaagctttaaggctaaagtgcgacgaccatatagtggactttggtagcctaagacttgtcgttccataaatgacatcgatgaaccacataaaatcaaaaataggttagtttctttgaattcatgatcaatgtaggattgcaacattgaactaattgtagggtaagccttagccaaataaggaaattcgtcaataactaaaattacacgttgtttttgagctaggtgtgtaatttctttaaagcattcctcaaaatttgcaaatttttcttttccaccctgatctgtatttttaaaaatactaattgcatcagaaaaacgttttagattatcttccgcattttcttcaagtgctacataataaattgactttttatcttttaaaaactcattgatcagtgaagtctttccaattcttcttcgaccatagatcactgtaaattgaaaatcattttcttgatacgcctgattcaattgctctaattcttgatgtctacctacaaacatagcgcactccttttcactacatcgtaatatactacattatattatactataacacgatatagtataacgtaatgtacgtgtattctatttttgtaataaaaatggccgttacttagagaaatagcgaagatcattaaattttaacatgctataataacaatagaacaagaataaaaagttttagcgtgcgcgttgaggtagctcctcaacttagtcattaacgtgtggctctgctttggcaaagcttttttgttatgttaataccctacaaaaaagaccgtgcatccctgcacggtcttttcatcttatcacatctattttctaacgtattcgccgttcttgtacttaaattcaatcttcttgttaggcaattgaaccgtaattctgcgatatacaggaccgaagccgtgcttttcaagcttaactttcacgctaccgtccttgtttaccttaaccttgtacaagttgtattcgcccttttggtacttaaagtcagttccgttatcttgatagtgaacgtacttaccctttttaccaaatagtctaaaggtcatactctcgtctggttcaccagagatgtggctaacttctttaccccatggcaagatagtgttcttcttgataaacagtggcaacttgccaattggtgcatcaaccaaaatcgtggtctttccagcatgttcaacaccattccagaaatcaatccattttccttttggcaaatatacggcacgcttggtttgaccttcttgaacaactggggctgccaaaatgtcctcgcctaccatatattcatcattcaagttatacacctgtggatcattttcataattaaggacaagtggacgcataattggcaaacctgtcttagtttcacgatagaattcatcgtaaagatatggaatgaaacggtaacgcagcttcaagtacttacggtaaattgacaaggttggttcgccaaatatccatggttcttgtgagcgagttcctagagccgcatggtttctgtacaatggactaaacaatgcgccttcgatccaacgagtcaacaattcaggtgttgtgtcagcaccaaagccaccgatatcagtaccggcaaagctgaatccactcatacctaagttacataattgtggaatcatcatttggacatgtgtccataaactttggttgtcaccagtccaaactgtggaaaacttttgcgttcctgcatatgctgcacgcgtaatgacaaatgggcgttttccactgaatttcttcaaaccttcataagttgccttagccatgttatgaccatagacattgtgcatcttcttatgagttgaagcttcttcttcattatggaagacgatattttgtggaatttcacccttgaaggatgcaggttcattcatatcgtcccagatacctgaaacaccaaggtcaactaagtacttgcagttcttagcccaccacttacgtacttctttgcggccaaagtctgggaagactgaatcgccaggccaaacttggtttacataaacagtgccatctggagcctttacgaagtagcccttttcgataccttccttgtagatcttatagtcatcatctttcttaacgccagggtcaataatcgtgattattctgaagcccaatttacgcatcttagctacgaatttctctggtgactcatagttatcttttctccaggtaaatactctgtagccgcgcatataatcgatatccaggtgtaaaacgtcacatggtaagtcatacttacgcaagttttcagcaatcttctcaacttgcttttgactgacactgtagccccaacgtgattgttgatagcccaaagtccacttttgtggcattggtacacgaccagttaaataagtgtagttagtaataacttccttgagtgagtcaccaccgatgatgtagtagtcaatattgccatcaaccgctgagtagtagtaatagtcattactttccttacctaagtcgatgtggttgcgataagtattgtcaaaaaagataccgtaaggatgaccattttttaatcctaataaaattggaatcgacttatacaaacgggtaaagctctctacttgcggatcaggattgtcagtattccaattatcataagcatagtggcgtttgttcaaatagccggttttatcacccaagccataaaattcttcgtcatctgctagtgacttgaccacttcataataatcggcgtcatgctttcccagtaatttatccacatcatggccttcagattcagccagcttcaaatgttcctcatccatctgtcggtcaattggggttcttttcccccgataatctacgaccaatggattgccttgttcatcaaagacgtcaattttttcatcatcataagcttttactatcaacttagccgtagctatttcaatatgatcgcctttatttttaactgtaaaatcagttttaatttctttatcgccttcgatagcataagaattgctagcattacctcgatcttgaaagaatcgcataatttccggtgttaacacggtcaaaatcattggtccattctcatagtttaaggtaattttttgtccatctttagtaaaatcagtaagttgattaatcataatttacctctaaaaaatcaaaagttatgtattcgctttcaattttaacacaataagctaatcaattgggtcataccagaaaaaacaccttcagaaatttttgtatttaaatacaaaaaaactgccttacggcagttttatttaatttattccattggaaaaatcttatctggattcaaaacataatttggatcaaaaacatgcttgatctttctcaaaagttcagtgtaatcatgaccatagaaatcctcaaaccaatctttgcaggcataaccaataccatgctcgccagacatatttccatccaaagctttagctgtcttataaagttcggtaatcacataatgactcttttgctcaaactcttcgtcactcattgcatctgagcaaagataaatatgtaaattaccatcgccggcatgaccaaagttaggaattcgcataccaacctcttgttccaattcatcaactctatgcaaaacatcaggaatatgattaattggcacacaaatatcaacttcatccatctttggcgtagacttttgaatagccaaaagcaatgcttcccgacaagtccaaatcttctttgcttcctctgaattagcatctaaaattaccgcatcagctgctttaaacttcttcgttgctgcaagggcaagctttaattccgcatccaattcctctttagttaaagaatcaagccctagaataatgaagccatcgccatttgcaatcgggaatttttcatcgtaatacttttcccagagactaatgacttttctacccataaattcaacggttgttggcactacaccagaagccaaaattgctggtactgatttaattgctttatccaaattaggaaacggaataattgcattgatcgattgtttaggacgtggatataaacgcatggtaacttcagttactacacctaaagtcccttctgagccaatgatcaggtcttttaacgaataacctgatgaggacttaactgccttagcgccaaatttgtaaagtttaccatcagttaaaacaaccttcaattcgcggatatgttctcgagtaacgccatatttaattgctttcaacccaccggcgttagtatccacattaccaccaattgtagcccaatgcattgctggagctggcatataagtaaatggtttattggctaaatattcttcaatatctttcaaccgaatacctgcttgcacagtcatcgttagactttctggctcgtattccaaaaccttattcattttcaccatatccagtgaaatgccaccttcaacggttaaattgccacccattagaccagtcgaattaccacgcggaacgataggaatatgatgatcgcttgcatatttaacaacgttttcgacttcttcattagtttcaggttgaattaccaagtaaggcattgctctaaccgtcttaaattggtcatgatcccaatgaacagttggcttagtaatgaatcgctctggatctgagataaatttactcaaattatctatatctgttgcagttaattttttaaagtccatctttgacacttctttccaaattgaaacatcctatattaactaatgtatccgcttttgtaagcggtgtcaaaaacaagaactgaagatttttttatctaaaaaagcaaatttccatactacctcactttaaaatgcgatagtatcgactttcatttaaataactattacacaaaatatgaaaataaaaaaactgccttacgacagtttctagttaaataaatccgacatcttagttggaatattattgtttttcacaaaatactttttaaaagtaggtaaatctgcattttcttttttcacatacatatcatgtaaagcccaaaatgcagtgattaacaaattaacgcccaagacaattaacataccgattaaaatatatactaagtaaagcattgatctatcccccgctatatcgtcacttgacccagagtcgcatcttcaatgaagtatctgacgaaagcttgattgaagctcatgccctggccgttgtaaacatgccactcttcgcgtttggcacctacagttctaatgattgaaattactgtgcaaattaccaaatatgcgattagcacgttaaaaattattttcattaccagcatgtctacacttcctctctgtactactcaactaatacactaatatttattagtcaatttgtcaacatcttttagtatttacttttttctccccaggtataaaaagccatagatagctggtccgatcactaccgccccagctatagaaactataatcactgcaataaagcgaggcatagcaaaaaattccgagctaaatttcatacaggcccaggccccaaagaaaaaaatcgcccagccaattaaaattgaaattagcatatttaaacctgaaaatttaggtttagagtttttattgttcatcaagttttctctttcataaaaatattgtgccacaaattgaaggtcaataaacaaaagtgacagattcggtcgttttttagacttatttggtaaaaaataagggagattaagtaaaatatggcgcttaatctcccttttgaatcaataattatttgcccataagacctgaaaaagccattcctaaggcagcaccaccacatgcacctgctttagctgatacgggacgagcataactagtaattgcataatgaaacttcatcacatcatgtgacaatttaccctgccagcttaatggatcaagaccaactcgaattaagttgcagacataattagctgattcaccattttctaactcatgctttgcatcaagtaggatttttctttcttctggcttagtatcttcatttactagtaggtcagtaatattacttaatagccattgttttaaatcatctttattttcttgatacatttttatccctctttttcgactttttcattaatatcaggatgcatccctacaaccattttagaatctttcatgttcttcatcgattcatttattttaataaaaaactctgcaagtagcagagctttttacctcattgcagagttacttatacatatacttagcacatgcttttttagaatccataccattacgaatcttcaaagctaattcaatcgatacatccgcaataattgattgtgggtcaatcacattgtaaggatgatctggtgccttttcctgagctaacgacaattctgtacatcccagcaagattacgttgcagccataatcatcatgcattttttgcaagatctggtggtacaatttaccatcaaccattcccttttctttaatatcggaataaatgagcttattaaccatcggttgaatttccggaccacctaattctgcctcacggtgaaccgcatgaatttcatccacatacaaatgatcatagattgacccttcagtcgcaatcaagccaattttcttttcttgtgggtatttttcaataaattgatgcactgctattctcatcatgtgtaaaaatggaatatcagtcaatgcagccaaatcatcataaaaatagtgagcggtattgcatggcatcacatagaagtctggtcccaatttggcttggcccagaacatcgtcacgtaaatcatagaaaaagtttggtttagtatgatctttaatataagccgttctatcaggaatttgtgcatcattaaccaaaatataatttaaataatcttggtccttagctatttttacacggtgattaattaaacgaacgtagctttctgtggcaatagttcccatgccgccaataatactaaagaagtgtttcactattttcacttactttctaaagtgttcttcttgaccttccaactcattaattacctgctgtgcaaccacaatatcagatggatatggggtatttactccgcgaattttttggaaagcgtcagcccccttaccacagattagcacaacatcatctggcgtagccatggcaatcgcatcatgaatggccttcttacgatctaactcaatagtaacgtcgcacttagagtgatctattcctgaatcaatttcttcggcaatactctttggatcttcaaagcctggatcgtctgtagttaaaaatgctttatctgcgtatgcagtcaaactttcactaaaaccgggacgacgtgacacgcctttatcaccaggagctccaacaacaacaataattttaggatcgttgaattcgttacgcataaatctcattaaagccatcattgaggccttattatgagcgtagtcaactacaaccatgccgtgcttctttgttctctcggtttgcatccggcctggaatagtaacatcgcgaatacccttcgcacattgatcatggttaagtccagccaagcctgctccaataattgcggcagtaccatttgactcgttgaaatcacccagcatctttaaagtataatcaccattaattggtaatttacgtgccttatcactagcacaaactaaattgaaccgagtttctttcatatctaattgttcagaagagaatctgaaatcaattggctgcttcaagtctggattttcaaaattatcgcgggcaaacaaataaatactatcggggttggtagtagttgttgcggcagcgtagacttcatcaaagtgtgcagtttcagcgttgataatacatttacgtgagttaacaagcaattgtaatttgcagtgcaaataatctgcaaaattagggtgttcgttaggaccaatatggtctggactaatattcaggaaaaagcctaaatcataagttaaaccgaagacacgatttttcttatatgcttgactagaaacttccattaccaagtgagtcatgccattatcaacagccgttctcatgtctcggaataagtccaaactctctggtgtggtcaagcttgacttaaagctatcttcaggcttaggaccgaccacatcattaactgaagaaatcagagctgtcttaccaccatttgcttgatcaagcatccctttcaaaaagtatgctgatgtagtctttccctttgtaccagtgaaagctacaacaaacaagtcatcttgtggaaaacggaagaaagcagctgacaaaagagccattgccttagaaacatcgcgcacaattaaagcgtgcattccttttccttctggatatggttgttcagctacataacaaatggccccattgtctttagccattgacaaataagttggtctaaagcctgctcccttgcagaagaacaatgtattagtttgaatatcgcgtgagtcataagacacatagtccattttagtagctactgtatcttgcactgcgcttgacttgagcaagtgatgctcttttaagatcaatatacaggtatttaaggaaatactcattaacttttctcctcgttgtatttaaaacatttcagtcaaaattataacacagctagtgtgttggtgacgctttcttcggatcaagtggcaaacgaataataaaactagtccacttttcgtttgattcacagcgaattgtaccatggtgtaaatcaaccacacctttggtgatagataatcccagaccagttccgcctgtcttagtatttcgcgaagtttctacccggtaaaaacgctcaaagattttatttaatgatttcttcggaattggtgccccattattttcaacgcgcaactctacttcacgtttgttgactaaattggctaccaatttaattttagttgcccctgtaccatacttgaaagcattagaaatcaaattattgtaaacgcggaccagcttttccgcatcagccttaatcgttagattctttggccgcgcttcaatctctatttcaatgccatttttttctgcttctaattcaaagccggccgctacctgctccaacattgaataaatatgcaaatcattcagatttaacttagtattggtcgactttaaagtagtatattcaaacagatcgttagccagtgctttcatttgttctgccttagtataggcaatattgacatactttttctgatcttctggcgaagtcactcctgcttttaacaaaccaagataaccaataattgatgttagcggcgttctgatatcgtgcgaaacattagtgatcaattcatccttagattgctcaattgcccgttcttcattaatcgaatttacagtactatcaaccaacgaattaatcgaatccactactcgttgcaattctggtcgtacccgaaaattaatccgatgatcaaaatgaccattagcaatatagtgaagttccaaaataatgtgacgtagctgcatttggtgatagcgtcgaatcaagcgccagtacaaaacaaccaagtcgcccactcccattaagacgatgaatacgttttgccaggaccagagatgatagccacctgcaaaagtgatcgtcttttttagaaagtagattccgttgaccaggctttcatcctgcaaaatagctaagtgaatcagaatgataattgataaatttaataaaaacagaaggacgaccgttacgaccccttctgcaaacaattcgctcttttcggcgccagttagcttgacgcgttcttttttcatcttatgcctcgaccttgtaacctacgccccaaacagtttggatgacatcctcaccatcagtggctttttgaattttatcacgaaggtgtgacacgtgtaccatgacagttttagctgaaacaattgattcttgttgccaaacacgttcaaagatttcatcagctgaaaaaacacggttagggtgactagcaagtaagtataagataccgaattctaaggcagttaattggatagtcttaccatcaatagtcttaacttcatgtgaatcacggttcattaccaatggtcctacttccaaaatatctggtttttcattcttaacttgcttttgacttcttctcaaaagtgaacgtacacgagccattacttcaagtggattgaatggcttagaaacatagtcatcagcaccagtgattaagccttgaatcttgtccatatcaccggttttagcagaaacaataataattggaatatcggagtcttttctaacttccttaattacatcgattcctgacatatttggcatcatcacatccaaaatcatcaaaacgatatctggcgtagtggtcaatttagtaattgcttccttaccactatatgccgcaacaggttcatatccttcatttttaaggtagatacttaatagttctacgatttctttgtcatcatcaacaactaaaattttcacgaggaatgttcccccttcttgtttattattctctgtttttctatctacagtttagcagatatcatatagaatattttacacattttagaaaaatatactgctttcattatcctttttaaacaaaagctaaaaaaatacacgtttctccatcatgaaaaacgtgtattcattctatttactttaccttatcatcatgcaatttagtttcgacataaacgcagacgataaatagcaaagcaaaacagcagatcttaggtgctgttgcataatcaagcatgctagcaaaaccgaataagataccatctggaacaacccaccaggagccgatcgaagaattaaaggtatcactaactgtcgcaaagaatgcaattaaaatcgttaaaacaagtaaaactgaagttaagatcattcccggccgaccaaaatctttaaaaccatgatcccagtagactatcactccaagcagtaccaataagattgataccagccatagactaccctttttcataataaaggccttctttctgcccttatcctaacacgattaagtagcagctgccttgtttaacgcttattgaatttccttcttgccagtgtagagttcatagtagtaacccttttgcttgattaattcatcatggttaccatgttcaataatatgaccatgatcaagtaccaagattaaatctgagttaacaatcgttgacagacggtgagcaataacaaaactagttctaccagtaagcaagttgtccatcccggcttgaaccattttttcagttcgagtatcaatacttgaggtagcttcatcaagaatcattactggctcatcagcaatcattgcccgcgcaattgacaacagctgtatttgcccttgtgaaaggtcgccgccatcaccatcaatcacagtttcataaccgtgatcaaggtcatggataaattcatctgcgtgtgataacttggctgcttgataaacatcgtcatcactggcatctggattaccaaagcggatattgtccataattgtgccagtaaagagatgggtttcctgtaaaacaattgaaagtgattttctcaaatcatcttttttaatgtttttaattggaataccgtcataagtaatcgttcctgaatcaatatcgtagaaacggttaagcatgttagagatggttgtcttacctgcaccggtttcaccaactaaagctaccttcattcccggtttggcattaatggaaatgtcatgcaagatttgatgatctggtacgtagctaaagttaacatgatcaaaaataatatgaccacgaacttgaaccttcttggttgagccatctttttgtggtacattccagtaccacttactgccgacttcatcgtttttcttagaaagagtaactgtaccttggtcagcttctgacttttgatcttccaagttgaaaattctttctgcaccagctaaagccattacaatagagtttaattgttgcgaaatttgggcaattggcatactgaattgcttagataactgtaagaatgaaccaatggcaccaagtgaaagcggagcccaactattaattgcagcagcaccaccaacaaaggcgatcaaaacgtaaagcaagttacccatgttacccataattgggaataaaattgtagcgtaagtgttagccttacctgaggcttgacgcaactcatcattatatttgtcaaagccttccttagattgtggctcatggctgaagaccttgatgaccttcaaaccattaagcatttcttcattataaccattgatttggcccagcttcttttgttggacttggaagaagtgacttgatctaaccgttaagtagcgcacaattccaaatgataaagcaaaaataatgaaggagaacacagtcaattgccaactaagtgaaaacatagcaactactacaaataataaactcaaagctgagttagtaaattgtggaattgactgtgaaatcatctgcatcaaggtatcaatatcgttagtataacgcgacatgatatcaccaaattcattttggtcaaagtatgaaattggcaagctttccatgtgaacaaacatttcgttacgtacacgatattgcactttttgagctaaaacacccatcagcatgttaaaaaggtaattagacaaaaaaccaatcgcatagatcccaaacattaccgcaattgcagtagctagagggccatagttaggaactttttctttagttaaaggcacaatataattattgatcaaacgttcaatgaataacgagccaataacgttgctggcagctgctagcacaatagtgatcatggaaacgatgagcatccatggacttgtactattaaccagtttcaataggcgcaataagattttggttctgctaccctttgtttgatttttacttttttccattgcttgatccaaattgctcacctactttccttgttcttcctggaatttagcgattgaactataaagttcgttagtcttcatcaattcatcgtgggttccgatagcttgaatttgaccatgatccatgacgataatccgatcagcatccttaattgaaacaattctttgtgaaataatgattttagtagtttctggcatatctttagccaaagacgttctaatttgtcgctcagtactggtatcaacagctgaagtggagtcatctaagatcaagatcttcggattcttaagcaaggctctggcaatagtaattctttgcttttgcccaccagaaacgttgttaccaccttgttccaccattgtgtcataaccatctggcatttcacgaataaagccatcagcatgggcgattttagcagcggcaattacttgttcatcggttgcattttcgttaccccacttgaggttatccttaatcgttcctgtgaacagcacattcttttgtaaaaccatcgcaacgttatcacgcaaggtcttcaagtcatatgacttaacgttgtgtcctgcaacccgaacggcaccagaagtaacatcataaagacgcggaatcattgaaaccaaggttgacttcgatgaacctgtttcaccaataatcccgattgtttcacctggcctaatgtgcaaattgatatcttttaaagcatcagccttgtccgcaggttcgtacttaaagctaacgtgatcaaagataatttcaccattggtcaaacgtttcaatggcttcttaggatcttcaattgttggttcttccgtaatcactgaccactggcacctgagataaccaattgcgtagtaatcatagctaaaatgtttaaactaaacaaaactgagtttgaataagtaaacattgaaattaattgaccagtttgtaaactaccgccaaccacttcttttgcaccgaaccagcagattgacagcgttgaaatattcaaaacagctgcaactactaatgcgttcaaagacataatcttttgtgcagtcgcaaacaacttgtaaataaagcctgatgacttcttgaattctttaatctgcggttgttcttggacataggtcttaacttcacgaataccacgtacgttttcacgcacaacctggttcattcggtcataccctctaaaaatcttaggaaagtatggataagctgttttaataatcaaacccaaagcaattgcaaaaaccggtcctaaaactgcaaagattaatgataaacgcggactaataataattgacataataattaaaacgatgaacatcattggtgctctaacagcaattctgatgatcatttgatatgccatttgcacgttgttaacgtcagtagtcaaacgtgtaactaaactggcacttgaaaagtgatcaatattttcaaaagaatagtcctgcatatggtagaacatgtcttggcgcaagtttgcggcaaaaccagcagctgcatgagctgagacataactcgcactagcgcctaaaattagcgaaataacggttaacactaatagcaatagccccattttactaatataggacatatcccccttcataattccgttatcaatcaaaattccgaccaaatatggaatcagcatttcaatgataacttcaccaataacaaacattggtgagagcaaagacaattttttatattgcctaattgatttgctcaatgttttgatcatagagacccacccttctattcttttattcaatctcgcaaataaaaagataaatggatcatctccatttatcttttttatctatattaagtttaagtatgtgcttatttttacggaaattcaattaacatgcttgcaaaacaggtaaattatttatgttgttgtggccttggtgcaaatgcggaaccaacaatattgtagtgctttctgaataaataacgtacaccataggcagccgccgcgataacgatgtcagctactgctggtaaaactgggttgattacgcgcaatgctgggatttgcaaaatccacatccagacaaacaaaacaactgctatagccaacattcttaagatcagcttaaccaatgaaggacgtttaccttgctgaggcattagccaatcattgtatttaaccatgaagatccccattaaaatacctacactggcaattgtcagaatccccatttgtgaattatacggttggttcttagtttggaataatgcaaggataccacataaaccaacaaaaattgctaaataaagcaatgcgccatcaaccatcaactgccaagttggtgtagccactggctttttcttaggatgaagcatttgttcagccttaattgctggtgaagccaggtaaagcccattggctggttgcccatgacgttgggcaataataatttcactgagcaagccattagtcatcgcaactgcatcagcacgtgacattgaaccttgtttttgcagttctttttctagacgaaaaacatagtcactgttcttgttactcaacttttcacgcaaagcttttggatcttcctgcttaattttttcatcctgagtatcaagctcagcttgcttctttaatttagcttgtttttcagtgttaatttttgtttgatcttgttctctctttgtctcttcagccattcttactcctagacgttaaatctaaattcaataatgtcaccgtcttgaacttcgtaatctttaccttcaagacgcagcttaccagcttctttaaccttttgcatagtttcaagcttgtctaaatcatcaaatgaaacaacttcagctcgaataaaaccacgctcaaagtctgagtgaataacaccagcaacttgtggagctttcatccctttgtggaaagtccaggcacgggtttcaggaccaccggcagtaaagaaagttctaaggcctaagatatgatatgcagcacgaatcaaacgatccaagcctgattcttctacgccttccatctcaaggaattctttcttttcatcatcagccataccagcgatttcttcttcagttgcagcagaaatacctaagcattctgcaccttcgctttcggcatgcttcttaacaatttggtaatacttgtcgctttctggatcagccattgagtcttcagcaatgttagcaacgtagataactggcttggaagttaacaagaacaagcccttaacaatcttttgttcatcttcgttgaagtcgattgaacgagcagcattaccttcttcaagtactggctgcaatttattcaaaacagccatttcagccttggcttccttatcgccttgttgagcaaccttctttaccttattgattctgcggttaacagcatcgaggtccgcaatagcaagttccaagttaatagtattaatatcttcttctggatcaaccttaccagtaactgaggtaatattgtcatcatcaaaggcacgaacaacgtgaacgatggcatcagtttgacggatgttttcaaggaacttgttaccaagaccttcaccttttgaagcacccttaaccaatccagcaatatcggtaaattcaaaagttgtgtgcacaatcttcttagcaggaatcaattcttgaattcttgccaaacgcttgtcaggaacttcaaccattccgacatttggttcaatggtggcaaatggatagttagccatttcggcaccagccttagtaatcgcattaaacaaagttgacttaccaacgtttggtaaaccaacaataccagcagttaatgacatttgttgtcctctttttctaaaatcaattttttatttttacttacttgtctattttatccaaaatttggccgagcgatacgatcttttggcacatattgctctttttttgcattaaccggatcattcgccttagttaatagcttttttagcttccggttaaactcgctgcgcggcatcatgactatgtgcccacaacccatacattttaatttgatatcagcacccatgcgcaaaatttcccaatcattagtctgacaagcatgaggctttttcatttgaactgtatcagccaaattataaacaatttctttagccatctaaatcaacacctaacaaatcaagaatccggttcaattcttcagtcgaagcaaaatcaatcgataaatgacccttacctttttgtgtttctgaaatattgacgctagagccaaacttattagccaattggctttcgctagcccggataaaggccgatttcttgacggtctttttgctgcgaggttttttagcgttcaattcactgactaccgcttcaaccttacgcaccggcatcccttccttgactactcgcttagccagcgcatcaatcttttccttatctttcaaacttaaaagcgttctagcttgtcccatcgacagttcaccatgttggagtaaacgcttagtcttgctaggtaaagtgagcaaacgcaaataattagcaatatatggtcgcgacttacccatccgcttcgaaacttcttcttgcgttaagccaagattcttctgcagcatttcataagcttgcgcctcttcaagtggagttaaatcttcacgctgcaagttttctagaactgccacttccatcatttggctttcgttaaacttgcgaataattgctggaatagtcatcttcttagccaatttagaagcacggaaacgacgctcaccagcaatgatctcatatccattaactgattcgcgcacgataattggctggaaaacaccattttccttaatagaatccgacagttcttttaagctcttatcatcaaatctttttctaggctgataaggattcggccgaatatcgcccaaatcgagttcttggacttcttctgcctcttgaacttgaggctcatcctcaaataaggcttcaagaccacgacctaggccgcccttttttcttggctctttacttcttgagtctcttgtcatgagcttttaacacctcttttgctaaatcatcatataccttggcaccacgagattttggtgcatattctgtaattggctgaccataacttggggcctcagctaatttagtaattcgaggaatgatggtcttataaactttcttgctaaagtaggactgcacttctttaaccacttcagcacccaagttagttctggcatcaagcattgttaacaaaacgccttctacgccaagatctttattaaaatgcttttggactaaacgaattgtgttcaaaagttggctaagtccttccatagcataatattcactctgaactggaatcaaaattgaatcagatgcagtaaaagcattaattgaaagttgccctaatgatggcggacagtcaataaaaacaaaatcgtattgatcgctaattgcatctaaagctgactttaagcgtgtctcccgagccatcattgaaattaattccgtttcagcaccggacaagttgattgtggctggaaccatatctagctttggcgttgaagtatggtgaatagtatcttgaataggaatttcgtcaatcaaaacattgtaaatgtcctggtcaatctctgatttttcaattcctaaaccagaggtagcgttaccttgtggatcaatatccacaattaaaacgcgataaccacggtcggcaattgaggctgctaaattaatggtcgtagtggttttacctacgccacctttttggtttgcaaccgaaattacatttaccatattgttcatccttccctattacttccttttcaattcaattgtgatcttataatcatccggatctttattttctgttactttgactttaattcctgagtcttcggctaacttaaccgccttcttaatggtgttaatttgtacctttaagtctttaggaactcggctaacgacccgcttagcttcttttttagccttaggcttagggttaaagtaaacatccacatcttgcacaatctcttcagtttgtttaacgtttaagccttttgcttcaatttctgtcaaaacgcgatcttgatctgcattacttaagccgatcattgcacgaccatgacgagcggtaattttgccagcaatcaaagcttgctgcacattatcatccagcttcaataagcgcaatttgttagccacataagattgagacttacccatatttttagccaaagcagtttgagtcaaatcatttaattccattaaattagtataagcttttgcctcatcaattggatttaagtcttcacgctgtaagttctcaatcaaggctaatgaagcagcttgatcatcactcatatttttgacgatcgcaggaatagtctgccagcccaagcttttagctgcacgataacgtctttcacctgcaataatctcatattgctcgtcatcgccatcttcacgaactacgataggttggagcaagccatccttatcaagtgtttcagctaattctttaattgaatcatcagaaaattcacgccgtggttgatagcggttaggaaaaatcttgctcaattcaagatcttgaacctgtttattcttaggaatttcatcatcatgatgcataaaagaaaataatgacataatatacccctttctgtttaatgaatcggtttgcgccgcggggtgcctgcttgacgtggatactttttaggtgttgctttgactttttgaactaagattagagttcgttcttcttcgctctcaggtagagtcaattcttcttccttaatcagcttaccgcccagcaattcaagagctttttgaccatcatccaattcatcttcggcttttggtcccttgagggcaataaagtaaccatcttttttcaccaaaggcaagcaatattcactcaaaacactcatccgcgcaaccgcacgagcagtaacgagatcgaacttttctcgataaagcttattttgaccaacgtcttcagcgcggccatgaactaattcgacgtctttcaagtctaacttagtaattaagttctttaaaaaagtcaatcgttttgccaaagaatcaacaatggtaatcttcaattctggctgcaaaatcttgagcggaattgatggaaaaccagcaccagcaccaacatcacaaagagtggcaccatctttaaaaacatcgccaaaagtaaacagcggcgtaatactgtcataaaagtgcttaaggtaaacctcatcttcttcggtaattcgtgtcaaattgacatgctcattaacttcgatcaaataattaaaatatattttaaattgttcaatttgttggtcagttaatttaaaattgtgttttgatagttctaaaataaatttttcaggattcatttttcacccgtgaaaccgtgtttcacacctctaaatttaacgcaaaatgcattgattagtaaagatatttcatcttatcaattatgaagtatttttactcaatcgtcaaagttttgccgcccgcaaaatagggtataataaggcgcaaaggagttaaaaatatgattgttactttaattgttttagcttacttagcatataaaacatatttaggctataaaacaggctttacacgctatatcatcggtttaatctgttccgccattgtctttatggttgccattttcatgcaaaatccatttggtaattggctatacacacaatacactggagaaatgattaagactaactccactaacaacgtggaattaatgattgcacgctttgtcgctttctttattgttttcttcgtgggcaaaatgatcatgaagattgtcaaaagctggattcctaacaaaaatccacatgcgactaacttaggcagtattctcgacaatgtcttgggtgctctagcctccctaattgctagttattttgttgtttatgtagttttgtccatgttcaatgcactacaaaatccatggtttatgcagcaaacaattgattctagctttttgaggtttatcatttacaacacaccggggctttcaaacggtgtcttcaataatatctttaatattggcaaaactgtgggataaaatatatcaaaaaagatctgcttgtatcatactgagcagatctttattgatatgttttaactaaattaatactacatttatgaaccaacattcgatatacttattagcgcaggaagttttatgagcggcggctggttctcccccccggaggtgaggcctatgggctacattgatgaaagggttccagccatgtcggtttacgagagtatctccttgatgcttttgttcggtacatttttgttggctttgctgacatatattgaccaccaccaaaaataaaaaacgccgctcaaacatactttggccagttattgagtagcgtttaacgtaaaatttaacatttgaagccgccgctcttaaagcgggctgcttggagtccctaggactcctttttctttagtcattatagcatatttcactaatcaccgaaattatcatattcaatatgttcatcattataaacaaagattgcaccaattcgatcagggttatcatgccaaccctttagtggcttgccagcaaagaataatcgtttgcattcaatttctgcttcaaccgatgttttggtaaaagtagtcacaccagctaaatcagtctttacaggatacccggttctaggatcaatcaaatgatgatactttttaccgttaactactaagtagcgctcatatgtcccactagtaacggctgagcattcaggcaccataactgacgtaatattgtcgcctcgcggctgtttaggatcttgcacaccaattgaccactggccactaattcttttaggcgaatcaccaactaacaagatattaccgcccagattaataattcctgcttcaacgccatatgcacgccacaagtcacgaattcggtcggcaatccaacccttagcaattccacctaggtccagctccatgcccttcattttaagaaaaacagattggtcactgtcatttaaaaccaccttaaatgggtcagttaacagcattctatctttaatttcttcatctttaggaacatgtgcgcctttaaaaccgatatgccaaagcttaacaactggtccaatcagagcattaaagccaaaattctcacggctcttttctactgccaatttaaccaaaccatacacagcactagagacctgtaccggatgttctccagcagcatgattgatatccattacttcagattcatctcgattaacggtaaaaatatcttcgtaatgatcaattaaatcaaatgatttttgcaatagatcacgattttgagtaccaaaaatctgcaatgtaattgaagttcctaaagcatgatgatcaccaaccacctgctctaatgctaaatctttaatcataattatttctcttccaaatataaatcacgcaacgcctcacgtagttctgtcgttacgccaattttttcttgtaaaaagttatcgaaactaccaaaattctgctcaatagcgattaatgaagtatccaaaaaagcatcagaaactgaacctaaaattcgcatattagcgcgaaaacaaagattctcgccctcttcttgcatttttttatctcttttggcccgatagttattaagcatataatttgagtacaaatagtcctgtctaattgtttccatatctacgccaagcagatataacaagactacagttaccaatccagttctgtcttttccttctgaacaatgataaagtacagcacctttttcagtattggccaacagctctaaaattttatgcaagctatgttgagcgtgttctttcaatacatgtgacttgtaacgctcacacatcattctaaagccagcatactgatcttgacgataagttgcgaatacttgggttaagtctttcttaccgcctttggtgttgtcatcaacagaaattggaatacagaaatgctctacgccagggattttgctgtctggacaatggtcacattcagttggtgaacgcaaatcaataatcttagtcaagccataattgagcaaaaactcttgatcatgtctcgttatgttgctaatcttgcccgttcttaataaccgatgcatcttgaccttacgtccctgatagccaacatatccgcctaaatcacgcggattacaaactttttctaatggcaaaatatttggtttcattaatttcatctctttattaagtattttgataaaaaagccggatagtgtccctatccggtaattttactatcacgtggtaagtcacgcaaaattatttgttagcttgttcaacaaatttaataaagttagccatcatagcatctagttgcttaatataatcttcattggtcaaatcgccagtttctttatcaaaattgcttgcagcaccgccaattaagatttcattgcctggcaaaacattggcactcatgtctggtgaaagcaagatttcacgagcatcttcttgcgcacgactagatccttgaataccgtatgaagtaccaacaactgcagccggcttcatcttcatcacattaggaccagcatgtgaacctaaccattcaagcgcactctttaaggcagctggaattgagtgatcatattctggtgtagccaaaattacaccatccgcattcttaacatcctcgatccacttcttagtaacatcatctggctcatcagttctacagaaaggcttaagttgatcgatttctttaacttcaatatcagcttgctcaccataacgcttagcaataaattttgctaaaaaacgattgaaagaaaatggagcgtttgtaccaacaattgctaaaattttcatttaaataagccccctacttagtaagttgtgcataccaatcatcaacttcatcaaagaagtgattcaaaaacttaagtgtacctgcatcggtcaagtcgcctttatcatcaaattgttttggtgccaaacccatcataaattcgtcaccagcaaagacatgagcactaaaaccaggtgcgcccaaaatgctcttcaagcgagtttgcgaacgagacgcaccttgaggcattggtgaagttgacacaataactactggcttatcatggaatgggtgaacagaactagaaagccattcaagtgcactctttaaggcacttgaaaccgagtgttgctgttctggtgaagcgatcaaaaccatatctgcatcagcaatttttttacctaaagctaatacgctagcaggagcatcaacgccttctttatacataggcaagcccttaacagtcgcaaagtcaaaatcatacttatcgcctaagtccttaataatgactttaagtaatttttcgttaaatgagttatcggcattggagcccgataaagctaataccttcataaaaaccacctttcaaaaatcctcttaattatcattatagactaatgtagtttaatttatgtcattttaattttaataacaacaagaaaaaacgccttcgataatgaaggcgccctctactgaatgaaaagcacaaatgattggtgaaatttctatgccaagttatccttaagcgaagcttcttcgtcggcagcaaacattgggttttcttgagtttcgctgagacgattgttaagcatagcatcgtggatttgagcattcaacacattgacgatttgagtttggctgaagcttgcaatctcattaacaatcaatgcagccatacctgtagtagaaatccagttagcaattacgatgtcatgaatcttttgatcatcataatcaacatcaggatattgttccttgaacttttcagttccaagttccatcaaagtgtcagcaatgatcttgctaccaaacttgccatcaacgaacattgctctaaacaagttaacatgagcttgagcaaaatcaatgtatgacaaatccaagtcaattaaaggttcaccaacgtacttttgttgtaaagtatgagttctcaagtcattagagattcttctcaaaacttgattgcgaagatcatccatgttgttaaattctagatacaaaggttgggttgagaagtgtcctgctttagcaatgctacgagcagtcaaaccttcaataccatccttgattgccatcttgtaggctgtatctaaaattttgtctttactaatttctttttttcttgccattttaatgcacctcaatcattgtataaaacatgtgcttttcaatacacttgttttcttttcttcatcactataatatatccaaaaaaataacaattgcaagtcttatacactaacttattaaaaaatattatcatcgcttaaatagcgatgagccgttgtctcctgtaaattgatcataatgtgaagaagccatttcaataactgcttgcttgtccaatccttgtgcagcacaaaacgaaaagaatgcagcagataaaatatagccgcgttcacgatcatctgtcaggttatctgagaacttcatattaatcgaatgatttgcataatccgttgtcaattcaatcgatttattttctggtttactactcattctattgcaacctcttttttgttctaaaacaaataaaattaaaaattcccggatttaaaattgaagtgcaacactaagtgttaaacaaaaaggccatgaagacctaaacttgaagtgacgaaaaatcaagaaaggaagatcttcatgaccaattcaaattctagcatttctaagcactatcatcaattaaccagcgtacaacgtggacaaattcaagcaatgctggattccggcataacttcccgtactgttatcgctcaagaagttggctgccataagtcgacaatcagtcgcgaaatcaaatgcggaagcgtcctgcaaagagacagcagctatttattgtatgagcactattacgctgatactgcacagatttattatgagaagcgtcgcaaaaactgctatcagcgcaatccattgaagcattatgctgtctttttgagaatgctctccagacgctttaaagctaaatttgatgccaccagcatcgatgagttcgttggtgaattcaaaaggactatgccaggctacccttgtcccagcacaccaaccgtctatcgctatattgatcagggcttgctggacataagcaatattgatctgcctatgaagctcaaaagacgcaggaacaagcgtcatcacagccatggcggtcacgctttgcacaagaagcatcttggcaattccattgaacagcgtcctaaggaggttgaagacagaaaagctccgctgcactgggaaggagatctggttaaaggcgtcagacgcaagaatcagcctgctttaatgactttgactgaaagaaccacacgctttgaagtagttatcaagattcctgactatcgggcaagcacatgccaaaggctgcttcaaaaggagattgacagacatcctgcctggtttaaatcaatcacgtttgacaatggctctgagtttgcggatatgaccaagatcaagggctgccagatttactttgctcacccatattctccatgggaaaggggcaccaatgagaactgcaatggtcttttgcgtcaattcttccctaagggcaagagcatgaaagacaagtcaaaagcttatgttcaacaggcaactgatgccattaaccacaaatatcgccgaatcctccaatatcacacagcagaggaactcttcaagcaatatatctcttcataacctaactgttgcacttaatttgacaattcaggaaaattaaaaatttaaaaatttctattataattatattacaaaatcaaaagaattagaaagcgtgtttttatcaatgaaagtttcaacttggcgctcatcatgcacctcaattttaatcgggaaaaaggcctctctttctggcagtatcatcatcggtcgtaatgaagatgctaagactgcttggcctaagcatttagcctttaatccacatcgagataatgtacagaaaaaccattttaaatccaaagacaataagtttgaaatggatttaccaacagctagctactcttattcttcaaccccagaatggacagataagtacggagtgttcgaagaagacggaattaatgaatatcatgtagcaatgagcgccaccgaaagtgcctacgcaaatgaccgagttttagctgttgacccctttgatactgacaaaggaatcttagaagaagcaatggtcaccgtagttttaccttatgttaaatccgcacgtgaaggcgttcagcgcttaggagaaattgtagaaaaatatggtgcagcagaagctgacggaattctctttggcgatcgtgatgaagcctggtacatggaaatcggttctggccatcattgggttgcacaacgaatcccagatgattcctacgctattgtcgccaatcaactagctattcaagaaattgattttgccagtgacgacttcatgtattctcaagacctgcaaaaatttgtctacgacaataaactctggcctaaaaatcagccattcatttggcgtgatatttttggcactcatgacgatagtgacttacactacaacacaccacgagtatggagcggtcaacgtctgcttactccatctgtagcacaagaacccgaaagctttaacctgccatttattcgcaagcctgatgcaccaatttctgcgcaagacgctcaacgcgttttaagcgatcactacaacaacaccgcctatgatttaaccaatcagaaaaacagaaataatgccactttcagacctatctctgtggctactactcaggaatcacacttgcttgagttaaacggtgaaaacatgattcactggctagctatgggtgtggctgcgcaaagtgtttatgtgccattctatcctcaaggcactaaggtaccaaatacctggaaaaatggaaaagaaacctactcaccaaattcagcttactgggtctttaaactggctagcgtcctggttgatcgtaattggggtaagtacggcaccgctttaagcaatacgcaaagtactactaacgaaaaattgcttcaaattagacagcaatatgatcaaaaattagcacaagaaaaggatcaagaacaacaaattaaattagtggatgaagccaatgccaaattagctaaaactgctactgatgcttataaagaattgatcgctaaactaatcaccgaacaaactggtgactcaccgttgcgtttccaaatggatcctaacttataaacaaaaatgcctcaatgaggcattttttcttactattttttcttagtcattaagccgtccatcatttcataaatatggtcggcgtatttttctagccgcggatcatgcgttactagaataacggccttgtcacgctttttcgctaaatctttaaacaattgtcctacttcttccacattttgcgtatctagcgaagcagtcggctcatcggctaacaaaatatctgggttagcatataaggccgtcgcgattgctactcgctgctgttgcccaccagataattcatttggatacttattaaccagcttttcaatccctagctgcttgagtaagccttgcaatttatcttgcgacaaattattttgcttttttactttatcaatcaaagtaaattgctctttaactgtcaaaaatggaactaaattataagcttgtaaaacaaagccaattttattcaagcgtagttctccactttgcttagcagaaaaattactaatgtctcgaccattaatcaaaatttcacctgaagttggtttttgcaaggacccggcgatcgtcaaaaatgtacttttaccggcgcctgaaggccccataattaaaaccacttcacccttattagcctgaaaattgatatctttcaaagctgcaactttagcttcgcctttaccataaactttattaacatcttttaattcaattactgccattttactcaccaattgcctttgctggatcaaccttcaaaattgatctaatcggaatcaaactaccaataatacccatgactagcatccctaacgtaccactaatcataattgctggcgtaaaagtcattggcacagctgctggtaaagttaaatcagttaaccacatcaagataatcgcaattacaacaccaatagctactaaaattatggattgactgatcgttgcaccaactaaagttttacttggaattccttgagcccgcataacggcaaaattatgcattttttgcatagttaaaatatataggaaaacagcaatcacgatcaaagaaataacaaataagaatccaatcatcaattcaaaagttaagttttgagccgtatatcctggaagcttattaataaaggcttgaattgggtatgtcttggcatccttataattgaatttataattgctattctttgaaacaactgcagaagcggctacattaggagcgaccatccgcagttttttccaagttttcattgagccataaacaattggcgcaatattaatcttggcgttatttacaaaaccaacaattttatattttttcttagagccattcagagaaatttgatctccaagcttgtagcctttgtctttgaaactactgtctactgtaatctgattaccattctttgcttttttcccagcaattatatcttgatcttgataaataaactggtcttttttgatgcctaagaattgagctgaaattgagttttttccctttttcttaactacaattcctaattgaccaataattgcttcattcttgccaatttttgcgttttttaaatcgtcttttgtcagaattgactgactcatgctgatattggcatttttatttaaaacaatcttttgcgcattccaattttcaattgcttgtgtattctgacttgctaacccaacagccaaagatgacaacataaaaattaagtagctgatcaaaaagatcatcaaaataatcaagccatagcgcaatttttcatgcttaatttctttcagtgctagaaacataactacatcccctttgctagtatgtccaggctcttcttatagcgcgccaagttcttttcctgattttcgggatctgataagcataagttgataacttcatgactaagtaccatggcactccacaattgtggccccatattcaacaattgtcttgaataaattttgaaattatgtggtatcaagtactcattttgcgacatatgcaatttcatcattggttcatatttactgtattgaactttatcaataaacttaactactcttgcataaaaatgattaggatcaaatttttcattaggactcatcccagcatgaatgtcttcaatagcgatgtgatacatataaacatatgcatcaattaaatcatcaaaatatttataaaatgctcctcgagcaatgttggcattcttaacaatatgtgacaccttagcatctgctaacggataagtgctgaattcttctaacaacaccgcttcaatacgtctacgtttagcagacggtaaatttttaaaagtttgcttaaccattttgttttccccttttccaacacaaatgacgacttgtcatcaattacttatatcatagctgattttgacgagttgtcaatacatatacacaaaaaaagaaggcctctgccttccttctctaaactaaaactcgattatagtagtacaacctagcaacaccatcacggacgctaaatttgcttaatgcacaattatttggcgtatctatcttgtccatgtcgccattactcaaataatgagctgccatcattcgaatcaaacgaccatgtgccactactaataccttaccttctggatatttttgatatatttcgtctaaaaagttagcgcaacgtgcttcaaactctccgtagccctcaccatttttggcatatttaacatagtcgcgagtaacttttccccatggatcaacgacatccggatattccttagcaatatcatccatcttcttgccgtcccaatcaccaaaatcaaattccagcaaacgtttgtctaaatttaatttctttttacctttagtaaaaattttcgcagtctctactgctctcttcattggactggaataaacaacatcaaatttattttcatcaaacttagcggcggattttttagcatattcacgaccaaattcattcaagtctgcgtcaacttgtgcgccctgaattcgattatctttattcacgtctgtttgtccatgacgaataaaaactatttccattttttacatcaccttttcttaaaatcatacccttatttaactaatctttccatttctttactgtttttttagcgttttgaaatttaaaaagcttaaaatataaatagataattagaaaggggaaacattatgtcccgcgttacaattgaaagagatggtctcaccttagtaggagaccgcgaagaaccattcggcgaaatctatgacatggctatcctcatgcatggttttaccgctaaccgcaacactgaattattaagacaaattgccgatgatctacgcgacgaaaatgtcgctagcgtccgttttgactttaatggtcatggcgaaagtgacggcaagtttgaagatatgactgtgccaaacgaaatcgctgacggcaaggcaatcttagaatacgttcgcaccgatccacatgtacgtaatattttcttagttggtcattcccaaggcggtgtaattgcatcaatgcttgccggtctttatcctgatgtgattaaaaaagttgtccttttagcaccagctgctcaattaaaagacgatgcacttaaaggtaacacacaaggcgcagtctatgatcctaaccatattcctgatactgttccactagtcggcaataaattaggaatgaaactaggcggattttatctccgaaccgctcaagttttaccgatttacgaggtctctgcccgctttagtggcccagtatcagtcatttatggtactaatgaccaagtagttaaccctaaatatgctaaaaaataccatgatatttatgaaaatagcgaacttcatgccattacggatgtagatcacagattcactggtcaatacaaaaagtcagcatcagatttaactgctcaatttttaaaaccattattttagcgccgagtaaagtcgaactcagtacgaaagacgtaatgatccttagtacttacgtcaggttcaaattgaaattcaaaatcattaaagtcctgcaaatctgtgggattttttatttgcttctcggcaatgtagcgcaccatttcaccacgagccatcttagcgtgaaccccaacggtcttccacttaccattttttagttcctgaaagtcaaccgtaattaattgtcgtccttgactcaaataaggtttaaccaaacgtgtatattgcttggaagccaaatcgataactatattatcttcttgaaataaattttcagcgatatcactgccccagaaataatacaagctataatcacgaaaaccaaccattttagtatttaattctaggcgatatgggcaaacaccatcaaaaggccggagcataccataaaatcctgatagaatccgcaaattcttttgaatatagtcaagtgcaggttgtgtaaataaatccggagccatatattggtattgaattcctgaaaaagccaaaattgcaggggttaatcgttcatccaaattcatattttctagttgcaatatgctttgcttagtcacattttcactagcatgccaaaggtcttttaactgttcatttgaccttgacttaagaaatctttctagaattcgtgtcttatccaagaactgcggttttgactgaattggaaatgaatcacgatcaattttcataatttttgcaggtgcaataataattttcatttttagattttgttcctttacggtaaacttaaattgtgattaataagtcatgtggtaataagtcaaatgaaaggcgatgatatttgttctttttgatcataaatttgagtatatgaaactaagccttggtaaaggttgattttttaaatgttaaacttttgtttacttttaaatttagaccaatttttgaaattaagacctcggtgtcctgtacagtttgtcatctttgagcaatttaaagataactcgtactaattttcttgcagttaatgtgcaagcacgtttatgcggcgagtagacagcttcatcatacttcttttggtaatattttttgaaaacaggatcatgtaatcttgctagattggcagcttcaatcaagtaatatcttagatatctgtttccagtcctggccattggagtatgttcgttgctgtgatctcccgattgatattgattccaggttaggccggcatacttagccagctgttcttctttatcaaagcgatcgatacttccgatctcagcgataataccagctgtataggttttgccaataccgggaattgattccagaattttgctttctggtaatgcatcaacgatacgatcaattgctttttctagatctttaatagattcattaaagctttggatcatgttgtaatgaacagaaagcactgcatcaattgaatcagtcattactttgcctaagcgatatgaacctctaacagctttcttaattgctttagccaaggtatctggatcggaaaagcgtcctctgcctttaacctgtaagtaagaaattaagtcttcggtaggcatatccgcgatctcatccagagttttactatcggttacaatagacatcattgtagcaccgaaaagaggagtattaatcttatctttatcgacagtgattagtttattaacccaataatataaagcttcaatgaagtgctgtttggtacgagtcagttcttgaactaattcatatctggtacgcgttaaacgctctaaagcaagatagttgtcttgtctggcaatgcttactcgataatgtccaaagcttagatacaaagcaatgtaataagcatcgagaggatcagttttactttcttcaaagactttatgaaacctgctggtttctttggggttaattacatcagtctctacattgagcttttgtaaatcttcgtcattttggaaaaagtaagcaggatgaaaactgtaaatagatgtagcttccatgccaataatgatttgatcatagtgtttattttgagctagatctaaaatttgttttttcagttcactagcaccataaagatcattgacaaagctatcgttaattaagcgtttgttttgatcttctgaatcaagtgcaacgacctgtaaatctttagaactaacatcaataccgacaaataatttcattggaaatggcctcctttctttcaaatttctgatcatagattttgatcttcacatgttaacccctaattacagttcttaagttcaatctcgccagtataagtattcactggttgcttctttgaaagctgcacctaatcccaattgctcaaggactagcaaaaagaagcaatcaatacagcatgtgagttagagcataaaggaactgcctgggtggcagacttataaagcagacaaaactgcaggaggtgataacctagaccagttgaccaaagccaatgacaattagaggctaacatgtgaagatcaaaaagcaaatactaatttgattaattatcacaatatgactaattacaatttatataatacgaggaggaaaaataatgaatcctgattttgcaattgtcttaaattatcaacttaatgataaggctgatgccgactttttagtaaaaacagcccgtaatatcggtgctcgtgcagtgatgactgacaggcaaactgaagatttcaaaacagcttgcgctaagtatactatttttttagctaatccagaaaatagtactgacttaactaaggataacgtcattgataccatggtcaataaccgtaaagctggtaagactacaattattaatgtgcccgttgaagcaggcaagttttctgccgcaactcaagcaatgctggatacgatcaatgattggatgcaccaattcggtcacgccttcaacgaaggaaaaactagtgctttaaccagtagcgatggctttattttagaaaatcgccacgcaaattaccaaaaatatgtcttcttacctagtcctcttcctgacaaaatcgtggtagaaggcctagtcgaagaacctaaccgggtagaatggattgaacatcgaactgatcttgattttaactataaggatcaaaaattaactattaacttagtcaaaccagatgatgagtttgcttggcaagtgttgcgaattcaagcccaccgacctgaagatgacattttagaaacgaaattttagtaaaaaggcgttctttgtagcagaacgcctttttacaaccttatgtaattgctatttctattttcaaaaaaatttattcttgcttaagctttaactactgaaccattatcaaaaaattctctaaaacgacgtgcttctttatccagagtaatttcatcattaacttgcgataacttatagccaacaaaataaggtggcgcttcaaaacgtgtaatatatttagcacaaataccgtcatcattacgcggataaaagaatagattataagaatcgcagcggccattatacatgatatttaacaaatacttggcaccactttgaatccagtcagcccacaagtcaatgctatttttatctaacaagttaatattgagctcagtgtagccttgaacggggtgttcagcaatgttaacttctaccccacttttttcaaaaagggtctcaccttcaaaattattcgggtgaatatatttatagccatcttcatgttcaaagccaactatctgcatatgcgggtgaatcaaggaaccacctgaatgtggaccatagttcttgtaccaaacaattgactcatattggtcactagcctgcactttttcaaaacaagctagcgcaaaatgcatcaacttgcgattatgttcctgcgtataagtactaatatcgccgttatgatcactagattcaattagtacagtctgccaggtatcgcgcaaggtcgggaacttattcttaagccaaatcatgtcatcttccttggcgtaaatatcagttaaattttcaacatcacaaaatgggcaaacgtttttcttcttatccttacgataagattgcggtttgcctttagcaatgctcatttgaaaaacaagtggatcattagtcatatttattcctttttttatttaaaatagtttaaaatctaatgggtaaagttttactataatgtaaaatattttgtagctttactagcataaaaatacttgttatactttgttaaagcaaacgtttattcgaaatttatcaagagacgggttttaataatgcaatctagaacagaaatgagaaagcgaaacaatcgcaacaatctctatcttattattattggcataattgtcgtaattgcaattatttgtggctttgtcattcataatcaaagggtagctgctgaacgtagccagcgtgaatatgcttctacccacttcaaccctaatgtaacaatttatggtgtgcaagtaggcaagcttactgttaacaaggcgactgctaagatcaataaacaagctgataatgtcgtctttttaagaaataaaaagattattgctgaaaaagacgacaaggttcaaactatcagccaagctgaagttaaaaatattttcactaagcagcatactgatttgccaagcaaacaaaaatacgttttcaaatccgccaaaatagatgaagcaaaaaagagtttgcaaaaaatacaaaatgctgtagtcacctataagatcaatggccaggaattcaagctaaaagctgatgacctaattcacgaagttacttacaaaggtggtaaatataaattcaccgatgtaaaaaaactgcatgctaaaatggaagcgatcgatcaagaagtcaaaactctaaagaagagttataaatttactgttcctactggtaacaaagtcaatggcaaaacgattacggtaaaaaacgaaagctatggttggggaatttatgtcaagaaggctgtggctgcagtagaaaatgcttttattaatggtcaagatgttgttggtggtagtaagtatatttatggcgagggttatagtacctatgctcatggttatggcaagagcaatcatggtattggtaaaaactacgtcgttgtctccatcaaaaatcaggaactatgggttgtccgtaaagggaaagttgccgttcacttaactgacgttgtcacaggtactgaaaataagagtaacgctactcctaaaggtgtttggtatatcatgtacaaagaatcacctagcgtattgcgtggttataacgacgatggctctaagtatgcctccaaagtacaatattggatgccatttactttgagcggctgtggcttacatgacgctagctggcgtagcgattggagtaagtcagcctatcttactggtggctcacatggctgtgttaacattcgtccagctgaaattagaagtgtttggaacaacgttttaactaacgatgctgttatcgtatattaaaaaataaagattaatcgcctacttcaattgaagcgggcgatttttttgcgtaaaattaacagaaaagatatagatttttgaaaggatcaaatatgttagtcatcggtattatttgcttggtggttgctgccatttcttactttaaataccttagtgaaaagaacggacaagctaaccaaaaacaagctgaaaacaaaaatgaggcaaaatggcagcgcactttagcaatcattttcctcgttttcggaattttattaatcggttattggattgcattacgctaaaaaagacgtgaattttcacgccttttttaaatataattgattaccacattacccatattagctcttccctttaaaactaaggtaggaccgccgccattgctttttcctttaactattacattaccaaggctaatgcttaattgattatcaatctgccatgataagggaacgtagagatttacatttcccattgaagcagttagattaagcacgactgtatcacctgctgctttagcatcatcaagatagatattggcattaccgaatgaagtttcaagattaattgactgtaaattttgtgaatgaatataacgtgaagaatcgccagccatcttttgattaattacgatattgtcaccatcttcaatcacatcttgaacatgatgatgtgttacttttgtctctgtatcagcatcgtcactatcatcgtcatcattccaatgaaaactcttcttgataacaatttccggatcttttttaaaaagcaagctcaatcccattgaaacaagcaaagcaataaacaaaatcatccaagaggataagaactttttaatgcccaggggacctgcataagtaattactaaaaaagcaattgagaaaacggacaccacaatgctcttatcaagcaagcccttaattaagcaagccacaaaaatgactgtcaaaataattgtccaaacgctaattttgaagcttaataagcctaattgactgatcaccaaaagcgcagctgcagcgattagtcctactccccacaaaattcttgcaaaactgtttttcattataaagaccttctttcatctaagcatgtgcgtaattctttgtagtatcgacgggatgcatatacagttttataagtatcatgaaactgtatcttgcaatctgaaatcgaccgagttaaaccataaatttgatctaaattaataattgtcgatttggaaatccgcatgaaacctgcgcccaaaatattttctaactcatacaatttatgtttaaccaagtatgccttatcttgtgtatgcaaaattacctgcttggcatctgtttcaaaaaacaaaatctcgttcagtggtaagtagtaagaaacattgtttctaaaacattcaatctgatcattgtgttcaataccttgtaatttcttataaagctgctctatttccggagaaatatttttagctttaataatcagttcatcttctacggcatctggatcaatctcaagttttactttcatgtttctcactcccttctgaatctgatatttatattaaaaaatatttcagatagcttttccatagttttgaactaagtggtaaattttggcttctaagtggcaaaaaaaataagacgacctctgtcgtcttattgcttattatcaatgtaaactagtaaaaaatgttatcagtccaaaaataattcctggaaaattagccgtgaatagcggccaatctttcttttcaccaagaattgcataaagtacccagatcgtgcaattaattgcagcaaccaacggctgaaccggattaccataatttccgttcaaattattaataatttgcggaatatatgaaacatacatcagtacagataataccgacccaatacgtccaatagttaaaacagtttttcggtctaatcctttgaattttttcaacaaatcgctcctttgtgcttcattataagaaaagctagagtcgattgcaaaaatcatactttagtggacaccttccattagcacattaattctcttaactaaaaagaacattattaccgcaaaggctacactgaccaaaccaacagccatgaaatattgtacttcagtgccagttgaatagaacttaacaatttgtgcattcactgcttgtccagttgcatcagccatgaaccacatactcatcatttgcgaacgatatgcattaggggccagcttggtcgtaattgataaaccaattggtgaaatcaacatttcagcaatttcaactaagaaccatgaaccaactagccaaaatggactaaccttgcctgctgtaccataaagcatccctggcaaagccatccacatataagatagaccagcaaaaactagccctgctgcaaacttgcctggagctgttggctgctttttccaatgttcccaaagccaaacgaagattggcgttaaaatcataatgaataatgggttaagagactgaaagttggctgctgtaaagtgccaattaccaatatgaagcacggttctttgagcggcaaacagagctaaaactactgagcctgattcttcaatgccccagaagatagctgcagcaaagaacaatggaatgtaagccttaactcgtgaacgctcaaccttagttacttttgaactacgtagcatcatcacaaagtaataaattggcagtgcaattgctaaaatagtcaataaagtaatgacattgtcaacgttcaattgaccaaagccggccattgcagctaatacaagggcaatcaccacgaacccaataactacccacttaataatattaagcaagtcacctctatcaataggatcattaggcgtcaaactttcaggagaaaggtattttttaccgccccaaacatattgcactaagccaaagaacatcccgattgcagctaaagaaaagccggcatggaagttcatttcattaccaaaaatatgaaagccaaaaccttgtgctgcccatggaactaaccaaggtgcaagaaatgatcctaagttaatcccaaagacaaagatgctaaaacccgcatctcttctgcgatcttcaactgaataaagaccaccaaccatgtcagatacatttggctttaataaaccagtaccaaccacaattaaggcaattgaagcatataacgccgttacaccggctggaagtgccaagacaatgtgacctaacatgatcaaaacgccgccataaaagacggtttttcttgaaccccaaacacggtcagacagccagccaccaactagggttgataaataaacaagtgaaccatagattgacatgattgatgcagccgttgtttggtccattcccagaccacctttggtgactgcataatacatgtagaaaagcaggatggcgcgcattccgtagtaactgaagcgctcccacatctcagtaaagaataacgtggacaaaccctttggttgtccgaaaaatgctgtatttgaatcttgtttccccaaataaaaactcccttcttatcatagataagcacaatagaaataattataccacgaaaaaataaggatccactttttacagtgaatccttatttattaggtaattattgcttcaaattaattgattgccttagcaactgcgttgttaacagccactttttcagcttcgatcaagtcaactttaccttcaataactttaatatccatcttaatttcacgactaagaagtggaatatttacctttggttcaaagaattctttaaattctttaagtctagttggagtatggaagacgcgagtagttactgtgatgaatgttgtaaattccatgtcaccaccgacagtcttatcaagccaatcccaatcttctctaatccagtcccaggctgcttgttgaccatgatggttgctgagcaaaccagcataccagccacgcaagtcttgtggtttaattacgtcagcattttcaaaattatcaacaattaacgcaacttcggccggatcaatcgtactagtaattgcgctacgaagatcaactttgtatgaaggatcagcagttctttgatattccttgattaggttttcgattaggttgtggctaccaaagttctttacttcattgattaaaacatacggacgaacatcagcattcattgcctctaagttgtcttcattagcagtgaaaatctcatgagctgttttaattgagtctttattttcagcgtaaagactggcacttaattcatatggacgaatttgtgcatcttcatcgctttcacctggcttaactttccagcccaaacgagcaacttgaccagcggataacttgtcataaagcttctttaagtccttttcttgagctgattcaggttcaacaaattggcgcaacttagcagcagtagcgtaaagagcattaataactacacttgacttcgagtcagcaaatttagtcaaaagtggcacaacagcagcataagaaatttgtttaccttctgctaaaagacgtaagtcttgcaataattgcaatttggcaattggatcaagttcatcaacatgagccaaaatatcatcaagcaaagtcttgtcatacttaacgataaagtgcgagttgttacctacattaattctaagtgggtgacctgcttcactacgtaaattcttgtagtaacctaagtcgatttccttatcagacataatcttaggtgccttgaagttagcattcaacggaatttgccattgtctaccaacgtctttaccttcaccaacgaagaattgttgttgtgaaagctttaagtgaccatcgctactatcaacatatgcactaactactggataacctggttgctttaaccatgagtgcataatcttgccaatatcaaggtcagttgcggttgaaagagcatcccaaagatcgtcaccagtggcattaccgaacttgtggtggtcgaagtaatacttcaagccttttcttaaggcatcgtcaccaagaagtgaacgaaccataactaacattctagaacccttggcataaacaatggcactgtcgaaggcagagtcaatatctgctgggtcattgatttccatttgaattggttgaacaccgtcagtagcatctctagtcaaagctgcaggtgcttcactggtttggaacatttcccaaatatgccaatcaggttctagaccatcaactgccaagtattccatcatgttagcaaaactttcgttaagccataaattatcccaccatttcatggttactaaatcaccgaaccattggtgagccaattcgtgagtaataactgtagcaaccaatttcttcatttcaaagctagtattgtctggatcaagcagtaaatatgcttcacggtaagttactaacccccagttttccatggcaccagcactgaaatctggcaaagccaattgcaatgattgtggaagtggatacttagtttggtaaaattcttcgtaaaattcaattgcgttcttagcaacacccaaagcaaagtctaattccttaggcttgtgggccttagttgcataaacaccaattaagacgccatccttagtgtgagtagtctttgattgcaaatcaccaaaggcaaaggcaaccaagtaactagacatgcgaacagtttcttcaaagtggtggtagccgtccttgtccacttcaacctcaggcatattggcaagagcaacttcgccatcttcttcatcccacttaagcgcaagactaaaagtagccttagcttctggttcatcaacacatggaaaagcttgacgagcaaaagtagtttcaaattgggtaccaataatttgcttcttcttaccttctaactcgtagtatgaaggataaatacccatcatagtatcagtaagtggtgcactataagcaatttcaattacagccttgctgtttacaccagttgaaattttgatagcttcctctttttcaagtacttcaaaatctacctttttaccatcaaccttaacgctgtcaatggtcatatatttttggttaataaatactggattttcaattacttcaccggtaatcgttgaagtaccattaatttctttttgtttacggtttacgttaatgcgcaaatcatagtgttctggatggaaagtttcataaaaacgtttaactgtcattttttacctcctattaacagctcatttacttttaattctaccaaaataaagaaaaaagcgctcaaaaaaggctatttcttattgattgtaaggatgacgtttcagttctgtaacattgctgtcatattgagcttgtactatagaagcatagtcattaagaaataaataagttttgaaagaattaattaaatttaataaggaatgaatacatcaatgaataaacatgttaaatctactttagtaaaaatcttagctgccttagcacttgcctttgcttgtgttgcagttgcaaatgctttttctaccaatacttcaactactcaaactgttcaagctgcaagaaagctttcaaaagctgaaaaagctgctaagagatggatcgcaatgcgcgaatcaggtggtagctacactgctagaaacggtgtttgttacggcaaataccaattaaacattggctacttacatggtaacctttcacctaagaaccaagaacgtgttgctgataattacgtttacggtcgttacggttcatgggttaacgccaagagattttggttagctcacaactggtactaaaattaaattcctttaattcccaaaagctaaagaaaaccagcttagtccaattgactaaactggtttttgttttactcaaaattatcttgcttgataaaacgataaagtgcaatgactaaaactaagatcgagcacgccattcctacataggccattgttccaatgtggacagcattgtcagcagcttcacgggctacttgattttccattgcatagcccacaacccatttacgcattaataccggcgtcaagacaaaactaactgtactaataattgaagtcactaacgctacattacgcgaatatggttctttaaagaactgtgctaatacgcagaatgctggagcaatcatcaatagcaagatccacataataatccagcgcccagaacttgaattcatcatctgcgcactattagtggcataacgatatgagctccaaagcgatccaccagataaggtattaagcaaactcaagaaataagatccacgttgtccataaacaccaccattattggacagaataccttgaacaagttggaaactatcagttgatccagccgatgaaaaatcgaccgacacaacttgcttcatataagtagctaaaaacatggtaactgagccacctaattctagtgctcttaacatgcttaattttcttgaagctttcagatgaaattccagacttaaaactcgatcaggatggtgactgtgaccaatgataaaaatccctgcaatgacgatcaaggctaagataaccaatccccaccagaatttaatcatggcgaaaaataaggctaaaacaataatcgcaaccgaaatatatggtcggtcagaaaaaatattccaaaagttcaacttaacatgatggtaatttttccttgatgcatttgcgacattttgattaataatcggctgaggattactaatttttctgctgcgaaattcttcacgtgttgttgctcttgtcttagtataatcggtccgtgaacgatctgcgccggcttggccgtgctcttttttcatgcgatattcacgccgcgacatatgtgccataaactgcagcccccttctcaaagcactatagtagcacattatcacttttttgcttgaattaagaatgaaatttcaaagaaaatttagctttgttttgcatgtgctaaaatgaatattaataattgtgctttttttagaaagagataactttttgaataaaactaaatcagcaaaactgccagctggttggcatatggccttttataccttatggctcggttgctttatcactgggatgggctattcaatgacaatgccctttatttcactatttatttcagatttgggtaattattctaaactgcaaatcaatctttattcaggattagcttttgcaatgacttttattgcccaggcaatagtttcaccatattggggcagcctcgctgaccgcaaaggtagaaaactaatgtgtatgcgtgcttctggtgtgatggctttaactattaccctaactggatttgcacccaatgcaatttatattattgtaatgcgttttattcaaggttctttttctggttatattaacaacgccaccgctttaatggcaagtgaaacgccgcatgaacgtagcggctgggtcatgagtcaaatgatgacggccgggactgccggaaatttggttggaccgctattaggtggtgctctctccagcttctttggcaatatgtttggtggcgcctgggggtatcggattccattcttcattaccggtgttttaatgttcatcgtctttttaggtacaacgttcttagttcacgaagactttactccaatttctcgtgaaaagatgaagccgatgggcgaaatcatgaaaagtttgcctagcgtgaaattgattgtggtgatgtttattactaccatgttggtacaatcatcaaccatgtcaattgatccaattgtttcattatacgtaaaatcaatgatgcctcatggcggggatgttgcctttgttgcaggtgttgttgcggcaacgcctggtcttggaacgctaattgcggcatcgcgaattggacacaagatggatgaagttggaccgttacgcgtattgcgaatcggcttagtcgtcggtgcccattgtttgtaccaatggctttgactaattcgccttgggtactagcaggactgcgcttcttattagggattgctagtgcagggatgttgccagccgcacagacggtattaactttaaacacaccaagcgaaagtttcggtcgaatctttagttataaccagtcatttcaagcagttggtgccgtgttaggatcgttaatgggatcgactatttccggtttttcaaattatgcaacggtattctggctaactggatttacgttactgatcaactttgtgcttgttttgatttttgcttggggaatttcttatcggaatagataggttaagcatattcctaaagtatggaatttaaaaatgtaataaaagagctgtaaatatcacaaaaaatatttacccggatttaaaattgaagtgcaacactaagtgttaaacaaaaaggccatgaagacctaaacttgaagtgacgaaaaatcaagaaaggaagatcttcatgaccaattcaaattctagcatttctaagcactatcatcaattaaccagcgtacaacgtggacaaattcaagcaatgctggattccggcataacttcccgtactgttatcgctcaagaagttggctgccataagtcgacaatcagtcgcgaaatcaaacgcggaagcgtcctgcaaagagacagcagctatttattgtatgagcactattacgctgatactgcacagatttattatgagaagcgtcgcaaaaactgctatcagcgcaatccattgaagcattatgctgtctttttgagaatgctctccagacgctttaaagctaaatttgatgccaccagcatcgatgagttcgttggtgaattcaaaaggactatgccaggctacccttgtcccagcacaccaaccgtctatcgctatattgatcagggcttgctggacataagcaatattgatctgcctatgaagctcaaaagacgcaggaacaagcgtcatcacagccatggcggtcacgctttgcacaagaagcatcttggcaattccattgaacagcgtcctaaggaggttgaagacagaaaagctccgctgcactgggaaggagatctggttaaaggcgtcagacgcaagaatcagcctgctttaatgactttgactgaaagaaccacacgctttgaagtagttatcaagattcctgactatcgggcaagcacatgccaaaggctgcttcaaaaggagattgacagacatcctgcctggtttaaatcaatcacgtttgacaatggctctgagtttgcggatatgaccaagatcaagggctgccagatttactttgctcacccatattctccatgggaaaggggcaccaatgagaactgcaatggtcttttgcgtcaattcttccctaagggcaagagcatgaaagacaagtcaaaagcttatgttcaacaggcaactgatgccattaaccacaaatatcgccgaatcctccaatatcacacagcagaggaactcttcaagcaatatatctcttcataacctaactgttgcacttaatttgacaattcaggcaaaaaatatttacagctctttattattttcaattttttacgctaccatcttttcataaatgcgatacatccgattatcataagcgcacattgaaataaccagattatagcccgcgttttctttctgccacttttcaattgcgtcaactgcgatcttagttgcatcttctgcaggatagccatacacacccgtagaaatagctgaaaaaattacgctatgcaatcccgctttctttgccaaagccagtgaattatagtagcaagaagctagcatatgtgcatcactagtcttgccagcataaactgggcctactgtatgaattacatatttcgcaggtaaattatagccatgtgttatccttgcttcacctgttggacaaccatgcaaagtcatgcattcctcaagtaaccgtggaccagctgctctatgaatggcaccatcaacgccgccaccaccaagtaatgaattattagctgcattaacgatcgcgtcggctttcatcttagtaatatcgcctttaataatttttatgtctttcataattatgtccttagaaataaccaacatttctttctaccaccattctaacaccaacaacatcagttaggctcagaaagaatacaaagcatattgttatttttatattacgaacttgaattgatttctatctttagtatcctaatattaattttagcgttataggagcaacgaaatgaaaattttacgacgcagtttatgcatcatttcgatcaccttattttcttttgctttgagcattctcattcctagtgttcaagctagcaaaatagttttagatgatctcatcatatttttatatttaattggaatcgtaattctgggcattctgttgttgtctaacaaatttgattacctatcactcagtctaagcataatcttgctactcgcaactatcattgcttggatcagattcccaatgattagcattatttatactttttttatagcttatctgagtatatgcttactaacaatttttattgctaaaaggattaagaaataagtcactatgttttctaagaaagaactaaaaatcatcaataacgcattaattattatctatttgctttcagtcggcccaacattcagagactgtaaaatattttgtgtaaggatgaataattccttaaatttatttcttaaaacattagaaaaaggagttcctttctcgtatgattggtttgaacaaaaaaacacatacagaaagaagaactccttcatgaatgattttacaaaaaatatagcacaagctctattcaatcaagacaaaataaacgatttattgcgcaaagagctacaacaggctgttaataacttgctagaagctgaattgactgcctttctgggctatgatccctatgccagaaatggctggaatactggcaattctagaaatggtgcttatttccgcaaggttgatacgcagtttggaccaattgaagtgcaagtgcctcgagatcgcaacggccagtttcatcagcacacgctgcctgactacaagcagcactctgatgttttggaaagcacgattatcaagctctactccaaaggcgtaactaccagagaaatcgctgacttgattgagaaaatgtatggcagtcattatagtccagcccaagtatcaaatatttccaagcagatgctccccaaggttgaggcttatcacaagcgcaagctaagcgacaagtttttctgtgtctatttggatgcgacataccttcctttgcgccgagaaacgtttgagcgtgaagcagtctatattgccattggcattaaacctaatggacataaagaagtcattgactactgcattgcgcctagtgagaacattgaagtctggacagagatgcttcaaaacatgaagtccagaggcttgaagcaagttgagctctttctttctgatggtgttgttggcatgaaagcggccttgaccaggacttatcctaaagctcattttcaacgctgcttggttcatgtcatgcgcaatatctgtgctaaagtccgggtggatgaccgcgaaaagatcatgaacgaattcaagcagatacatcaacagacaagccaaaaagaagctgcagctgtcttgcatgaattttatgcaaaatggaataaagcttatagccatgttatcaaaggtttgagggaaattgagcccgatctgctggtcttctacaattatcccaaacaaatcagagcttcaatttattcaaccaacatgattgaatcctttaacaacgtcatcaagcgtaaagctaagcctaaggcagaatttccaactgaacagtcgcttgatgtatttattggcatccaggcaatgagctacaatgaccgctatttcaaccgaattcataaaggctttggtcaggttcaggataccttagaatcctattttgattaaataaatgattaaaaaatcaatttacgagaaagaactatttacacaaaagatttgacagtttcaacattcatcttcggttttactaaatcaaatgatttcacaagtactttctttttaattgcaaatatcattttagtttgtttattcattatcattgctatcagaattgctaaaatcaatttcaggctaaagacacaatattatctactaggcttcatcactcttatttcaataatagaactagcctaccctggactgacattaaatgaacgcattagcaattattttgctatcggcaatattattttaggcttgctaactactaaaatctcaaagaaattagtttaaatataggacacaaaatgaaatatctgaaaacaccaagattaattaacagtattttgattactttacgtcatactgctataaattattgaattcttattactttaaaactacatcaggtattttcaatcattcaataaaaaataagactagcactaagccagtcttattttctattaatcaactattcttggggtgagaattgccatactgttccatcttggctacggtatgagccatcactcatctttgtaaatataaagacaacttttttcgtcctaattgtgtaaccgttttttgattcagttgtatcaactcggcccaaatcagccttaacacctgtttggggtggattatttttcttaatagaatatgcttgtaaaatttctttattaagtttagtcttcttttgctcagagttgttactatttttagcaactaaaatagcatgattctttgtaaaatacagatcaaaccaattacttaagcgattttctgtgttgtctactgttaatgttcgattaacccagtttttaggtaccgttgtttgattattgtagaaaaacattccaccaataactgctacaagtactgtaactactgcaattacggataacgtcattttctttttcatgatacgtttcctcttaaattcagcattaattatttggcactaagcctctcgaaatgagtcttacatttcctgaatacatgctaacccatcggtttctatttgttttaaaattgtgatccatccaggtactgtttctatacaaatagccactgtaggcaccatcattataataaactttagaaggtgttgtgttgagtaagttcattccatctcccctaccccaactactgtatctataaacattagatacatatttatgaagcggaccatttttgattggcccatacactttaacactctttgcttctcggactgtagtttctgaagcctgaacattctaactattggtagttaatactggagctacagttacacctacaagagtagcaaccactaataatattgactttttcatttttatttttcctcgtttaattttgatgttagtactactttcttacgaacagaagcaggtgcaggaatgctctttacatcatagctgtacaaatatcttctatataaggtagtagcactcttaccaactttttcacgcataacttttgaaagatatcctctataaccgttatactcaaaatagtgagtggcaccataatcataacttgaacctaaggtgatccaaattctcctaggtttatagtaatctgctcttagttttgaactcacagttgtttgtgtttcagctgatgcgctaacctgattcgaaactgtaaacaaactaacgccaactaatcctactagtgataatgaaactagttttcttgaaattgatttcatttttatacagataaagtaccttcactctctggccaaatcattattatttcctcctttcgtatcttgattatcccatgaaactctaatattacttctaaagttgcgtatcacaaaactactctttccaattagtcaccctatcttcatatcctagagaaataagcatggcttttacttctttagcttttgctatatttccttcatacaaacatttatagaaactcccacatgccttataaaaaagaaaatgattagtattgttcaaattcagtaagtaatctaaacaatttttaacctgatttccttttaagccataattacgccagcaataaaggtaattgatacaaatacttgctatcctatcttcatatttctctgaatatgaaaccttctcattgtaatgtttcaaaagaaaactaatataattatctgcttgttctgtagaaaaaacaggaatacagttatcgaataatcgcagcatatcaatattttctacccagttatcttttgcattaaattcagcaataattgtacttttgaattcgtcacctaactcatccaattgatttcgtacaattgctactgcaacaactactctgtacttaaatattctgctatcagataatttcattacttcttgcaaacattcttcgattttttctttatttgaaccattaaatgcacttttcagtttgttttcaagttttaattcaattaagtcctcttctgataaaaaatcatctttaatttgttccaaaaactgatctacatcaatatgatgggcaaacaagatcttaaatagactttctgcagaaattccttctattcctcgttcaattttagaataatggcttttatgaattattccttgaatcatttcatcttgcgttagtcctaagtgtattctttcttgtttcaaggcttcaccgatagtcatctttcatccctccaatttaacttcaactatactatctttttaattttctctccatacaaaaacgccttgctcaaaagcaaagcgttttttagcataagcaatatttgcattaacccttatcggcacctgcagtaattccgttaacgtagaacttctgcatgaagacgaacaagatggtaatagggatagcgatgattacacaccccgcaacgaattgtgcgaagtatgcggtcgcattacccttagctgtgtggaccatgttgtaaagtccatatgcaaccgtgtaagtcttagcatttcctgaagttgaaagaataatacctgagaaaatgaagtctgtccatggagcgatgaaagcggtcaaggcggtataaacgatcattggctttgaaagtggtaaaccaatgtgtaagaatacttgccacttagtagcaccgtcgatttcggcagcttcgtcgattgaccgaggaatagtatcaaagaatcccttagcaacgtagaagcctaagccggcaccaccaacgtaaaccaataacaacccgaagaggtttaacatgttaagacccttcaagatgtagtacaaagcaatcattgacatgaagcctggaaacatccctaaaaccaatgcaatttgtaagaatggttttctgaatgcaaagcgaagtcgtgataaaacgtaagcaactgaaatagttaagaaagttgaaattaccattgaaagcaatgaaataactaaagtattaatgatccagttaccaaatggatattgtggattagtaaaaataccaatatagttttgcaatgtgaatttttccggccagaaggtcgaaacgaatccagtatcattgaatgaaaaacttgctaagacgatccagacaatcggtaaaatccatagaatcgctaaaacaattaataggatataccgaaagattaatgagagccgtctttgatttgaatatgacttcatgtctagccctccttaaatgcattagtacgacgatatgcaatcagtgaaacagttgcactaataatgaagattaagatacccaatacggcactggcgttataacgctgttcctgaccgaaggtcaagttatataaccacgttaccagcaagtcagtcgatccggcaccattatacttactgttcattggtgcaccacctgtcagcaagaagataacattgaagttgttgatgttaccaataaattgttggataagtgaaggtgccatcacaaataaaatttgtggaaaagtgattgaacggaaaatttgtgcagcattagcaccatcaatcttagcagcttcaatttgatcttgtggcaagttttgaataatcgctgttgaaaccaacatagaaactggaataccgatccacatgttaacaagaataacggtaattcttgcaactaaaggtgaagcttggttatcaataaagtgaattggtgaactaatccaatgcaagttcatcaagatattgttcaaagcaccttggtagtccaagaactgcgccatcatcaaaagtgaaacgaattgtggtacagcccaaatgataacaaagattgttctccagaatcccttgtgcttgattccttttgattcaatcaaaagagcaagcaaaacaccaaagaagaaagtcgtagcagtagctgctacagcccagattaaagtccagcctaagactgggaagaaagtaccagctaagtcaccactcaaaacattgccaaatgcttggaagcctgtccatgagaaagcaattgggtgttgacgatcatagttggtaaaggccattgaaatcatgaagatcgttggcaaaatcgtaaagaacaagatacccaataatggaataaccatcaaggttgcgtgtaaccgagtatcaagcaaactcttaagttcttcaacgttagttggaatatggtccccatcacgcttcaaaatataattatgtctagttgagcgtaagttgacaatgtatagataaatgattgctacacataagatcaaggccaatacaccgaataacaaaatcaaaactgagtttgatggttgcttggttacataaacgccttgtgcggcatcataaacaacttttttggttttaatagtacctaatgtagctaatgaatttaaagtagggataccactgaggataaaccaaacaataaagataatttctgaaagtaagagtgaaataccttttacccattgtttgtttgccaaggcgttactacccattaagaagaatgataacttggtagcaatgtcaccttttgaccaaacctcgcgatatgttgctttaggagctacatgctttttctttagaaacataacttctccccttcttaggcaaaaaggctggacaatttttatttagcccaacccttgcttatgcttttagcaaattatttcttttcaatgttcttagcgagcttagcaagttgtggcttgtattgtgctggcttaatcttgccgtcgtaagtaccactgataagcggagctgcaccattccagaatgcggccatttgtggaagcttaggttgcaatactgagttacctggcttagccatttcgattacagcttcagcaaccgggtcactcttaacagcacttgagttgacagcgctcttcaatactggaatttgaccagcgttcttatgagcaattaattgtgacttcttgttagtaatgtaagcagctaaatctgaagcagccttagcattcttggtgttagcattaactgcgaagccttcaataccaaggaatgcttccatttgtacgctcttaccaccaacttcaatcttaggatacttagcaactgcgaagttcttacccaagatcttcttgatattagcagcgttccaaggaccgtccaaaatagcttgtgcgttacccttcttcaattggttcaaagcgtttgaagtttgcattacgcccttgttcttcttttgagctgcgtaccacttcaaagcattaataccgttttgtgagttgaaagttgagcccttaaggtcttcaccattcttaccgtaaagtgtagtacctgctgagaacattactggccacattacgtaagcgttagtaaagtcggtagctacaacaccctttgaagttaaagtcttccagtccttaacgtcgttagctgataacttagacttgttgtagtaaatggtttgagcttgttgtgcgtatgggaatgcgtaaaccttgcccttccaagttacaccctttgaagcaacatcgacatagttgtcttggatatccttagttgctgatggtgaaagtgggttaatgtaaccagcttcagccatttgacctaattgatcgttaggaacttcaaagacatcagcagcctttgatgggtccttaccaacgtctgtcttagcgttagctgaaccgttaggactttgaactacacgaaccttaatattcttgttcttcttagtaaagtccttagcaatttgcttgtagtaaggaacttgttcagtatccacccaaagagtcaagttagccttcttgtttgaattactgctacttgatgatgaattacttgagccgtttgaacatgctgctaatgataatgcagcaagaacagcagtactacctaaagccattttcttccaaatcttcatgactttttcctcctaaaaaatcaaaacaataaacaattcttaacaacagtagcttctgctacatatggttgtaagcttaattaataattatctgtactgcgttttcagtaccagattagttaacaatcgccttggtggaatctttatcaaagaagtgagctttgttaacatccaagcccatcttaaccttgtcacctggcttgtgataatcacgtgaatttacaatagcagtaaattcagtaccatcaacttcttggtgaagctgaatagttgcacccaaaagttctgaaacaacaacatttgattcaattactgaatctggccaggtttccataaatgcttcttctgagtgaatgtcttctggacgaataccaaagactaagtctttgtcgttgtagcctttttcttccagcagttttgccttaccttcaggaataccaatattcaagcctttgccatcagaaattcgaccgtccttgtagtgaacattgaagaaattcatttgtggggaaccaataaatccggcaacgaacatgttaactggcttgttgtaaacttcaagtggtgagccgatttgttcaactctaccaacagacattacaacaactctatcagccaaagtcatcgcttcagtctgatcgtgggtaacataaatagttgtagtacccaagtcttggtgaagcttagcaatttcagtacgcattaccacacgcaatttagcatccaagtttgataaaggttcatccatcaagaagataggtgccgcacgaacgattgcacgtcctaatgcaacacgctgtctttgaccaccggacaaagcacctggcttcttatccaagtactcttcaaggcctaacatcttagctgcttttttaaccttttgatcaatttcatctttaggcgtgtgacgcaactttaaaccgaaggccatgttgtcataaatggtcatgtgtggatataatgcgtagttctggaaaaccatcgcaatgtgtctgtcctttggagcaacatcgttcattactttatgatcgatttctaaggtacccttactgatgtcttccaaaccagcaaccattctcaaagtagttgacttaccacagccagatggaccaacgaaaacgatgaattccttatccttgatatgtaagtcaaagtcgttaacagaatatctgtcgttacctgcatattttttgtaaatatggtttaaatcaacctcaaccattgtttcccctactctctttaattatttttcattaaaaactttttcaatttcactcaatttcaactcagcagttgttggaacgatgtaatcagcttctttcaaaagctccttatcaccaattcctacggcaaattgacctgcagccttgattgcttcgactccagctttggcatcttcaaaactgattacttcatcagcctttaaccctgcaatttcttgcgctttgatgtaaatttcaggatctggcttaccatgatgaagtgttgctggatcaacaatgccatcaaattcatccataatacctaatctagttaaaatcttaggagcattcttagaagcagaagcaattaccatctttaagttttgcttcttagcatctgccaataactcagggatcccaggcaaaatgtcctttggcgtcattgtttctacttgttcaacaaatttagcgttcttttcagctgcgaacttttctttttctgcttcagtgtatttgtcttcttgaccaccgtacttcaagatcaggttaagtgaatccattcttgaaataccacgcaagctatcaagttgagcatctgttaaggtaatgcctaattccttagctaaattgttccaagctgtaaggtgaaacttagctgagttagttaaaacaccatctaaatcgaataacaatcctttaagcatttgtagtttcaccttctttaagagtaactttcttatcgtgaactaatacatcaatatcttcacccttaagcaaagtaagcttagttccttcatgatcaacataaacttcgatcaagcgaccacggtagttgatcttgaagctgtagtgatcccaaccttcaggaacaaatggattaaacttcaattggttgtgatcgtaacgcatgcctgcgaaaccttgaacaattgtaagccatgaaccactcattgaagtgatgtgcaaaccatcaacggtgtcgttgttgtagttatcaaggtcaagacgagcagttctttggtaaagctcaacagccttcttttgcttgccaagttcagcagctaagattgagtgaatacatggtgaaagtgaactttcgtgaactgttaatggttcgtagaagtcgaagttcttttccttttgttccatagtgtattcatcgttcaagaagtagataccttgtaaaacatcggcttgcttgatgaatggtgatctcaagatcttgtcccatgaccagtgttggttaattggacgttgatctttgatttcgctaactggacgaatatccttgtctaggaagtcatcttgttgtaagaagatgcctcgttccttgtcttctggtaagtacatgttatctacgatgtcttgccatttagccttttcttcgtcagttacgcgaactctttcttgagcttccttagtagcaagtggcaaacgttccaaagtgtatttgagaagccatcttgccatggtgttggtgaaccagttgttgtttacgttgttttcgtattcattaggacccgttacaccgtgcattacgtacttgttacgccactttgaccagtgaactctagctgcccagaatcttgcggtaccaactaaaacgtccataccttcgttcttaacgtagctgtcgtcgccagtgtaatcagtgtacatagcgattgcgtgaggaatgtccgcatttctgtgaatttcttcaaaggtgatttcccattcattgtgacattcaatcccgttgaaggtaaccattgggaacaatgcacctggtaagccttgttctttagcgttatggtatgcgcctggcaattgatcgtgacggtattgtaaaagtgcccgagtaacactaggatcagtaacacataagtacattggaacaatgtaggcttcagtatcccagtaagtagcaccaccgtatttttcaccggtaaaacctttaggaccaacgttaagacgttcatcttcaccgtaataagtcatgaataattgacaaatgttaaagcggataccttgttgagcggcatcatcaccagcaattacaacatctgatttgtcccagcgcttttgccaaacggcttcatgatcagctaagttttcttcaaaactcttagcttgaagcttggtcatcaattcagctgccttagcatcttgatcatctggtttgacgtcacgactagtaacaacaatgacatctttttcaagatcgtagctttcgccttcatttaactcaactgaaagcttttcatgaagttgggctgcttcagttgaaacatcacccttaactacttcaccattatgacgaagactttgcttaaggaggactgtaaattgtggaaccttgtatgggttagccttagtttcaaccttaatagttcttgcttcagcattttcacctaaaggcatccagaattttgcatcgtagttactgtcttcgttaacaacagttccatcaagtgctgcatcaaagtcgatcttagctttaccacttaaaacggtagccttaactttaattaaagctgcttcttttaaggtaatatgtaaaaacctttcgaattcgaatttaaccttagtatccttaccttcataagtaaaacttctagtcagaagaccttggtgcatatcaagtgctaagtagaaatcactaaacttaactttagctaagtcaagtttttcaccattaatcgtaattcccatgttgatgaaacttggtgagttaggaaccttaccaaagtactttggatatccgttcttccaccaaccaacacgcgtcttatcagggaaccaaacaccagcaaggtaagtaccttgtaagctgtcacctgaatagccttcttcaaagtttcctctcatacccatgtaatcgttgccgattgcagtcatactttcttgcaatcttttatcttttggttcgaacttatgggtaacgaccttccaaggatcaatttcaaaaattcgtttcatatattctatctcccgtaatattcgaggttctctcttgtttacgctttcattatcctttagttgaaagcggtttacaatattaaatctgctgttaccgttatcaggattagttaatagaaaaagaaggtagatcttaatctgccttctttttttgcttattaaaagtaacttttaatgaacactcactacaaagccttttggtgccaattgattattctcataatcttgactaaacgtgttctcacaattgatctctactggatgatcggtcgtgttaaagtatgctttaatgctttcattcccctcacgatcgacctcaattaacccattctctgttacgtgtaacttaattcgacctttaccgaaagtttcatcatgttgcaaacgaaagtcaatcaattgatgaactcgttgccaaaccggaccgtcttcttttgcccaatccattggtttacgacaatcaggatcgttgccaccagtcatacccatttcagttccataataaatgcatggactacccttttgcataaattcaaaagctaaggcttgcaaagccaaatcttggtctccattagctactgtcaaaattcgggctgtatcgtgtgaatcaagcatgttcatcatggctgcattggtagcatcgcgatatttcatcaactggtctgtcaaacgactagttaattcttgtgctgacagcttatgcttgaaaaagtgatcttcaatctgcaatgtatatggataattcattacgccagtaaactcatcaccgttaagccatggacgagctgagtgccaaacttcacctacaatataaaagtctgacttgatatcagtaacagccttgtggaatttcttccagaagtggtgatcaacttcgttagccacatctagccgccaagcatcaatatcaaagtattttacccagtaagtagcaatctctaacaagaaatcctgtacttctggattagctgtattcaactttggcatatgcttttcaaaggcaaaagtatcgaacttaggactaccctcaccctttaatggatcgcggtaaggttcaactggatattcattaatgtggaaccaactagcaaaacgagaacttggaccatttttaacaacatcttgccattgcattgattgatcacccaggtggttgaaaaccgcgtccagcatgaccttcattccgcgggcatgagcttcattaacaactttcgcaaataaatccttgtcgccgaatgccggatcaacttgcaaatagtcaatcgtatcatatttatggttagaactggctttaaaaataggacagaaataaaggccattaacacccagtttcttcaagtaatctagatggtcaagcacgccttgcaggtcaccaccatagaagtcttcgcggccaggatgatcctccggattccacgctttaaccccttggggatcattagacttatcaccgtttgcaaaacgttctggaaagatttggtaccaaacagtatgcttaacccattctggcgttttcaccatatcaatttcatggcaatatggcactttgaaataagaaccatcttccataatggccttgtctacatcactgctaattgcacgatcaccgacaactacactagtgccatcactgccaattacttcaaaggtatacttcaagcgatgatatggtgcttcaagcgtaatgccccaatgatcttcacactgccctacgccaattttttccatctcacatgttttagcctgttcaagtggcaaataattatcgcagtaatgaacaattacttttttaacgtcatttttagcactgtgaaaacgcacgcgaacatgacttggatcaactacaaaactatcttcactttcagttcggtgtcttaaagctgctaattgcatatattaattctcctttttcaacacaacacctgcataaggcatcaaagttaatttttcattagttaattgatattctcccgcttttagtgttgcaacagtataaccggctggtatttcaacagttgtcttttgatcactcaatgaaacagctacaatggcactttcatcatgtaaatcacgttgataaacatagctattcttatccgttgaaatcatataatacgttccaatctggaataaggcttcttttttgagttccagcagttctttgtaaaaattaaacatgctggtggtatcgttaatctcattagctacgcaagcatcatcctgtttaatacctgttatccatggtttaacttcactaaaaccatggttctcagttgcatcccacggcattggaccacgggccggcaatttatgtgtttcactaaccatagctaaggccgcatctttgctcaaaactttttctgcatcctttaaccatggcgctacagtttgatcttcgaattgatctgcactagtgaaatgtagattctttaaccctaattcttcaccgtaataaattactggaattccgcgttgcaaatacatcaacatcgccaagctcttagcctgagtctgtgttctagctacgcgtgtagccaaacgggccatatcatgattattccaataaagagtaggctgcgatacgcctgctaatgtttgttgccaaaccacttgattttgtttaaaggccgtcaagtctaactttttaggctgatattgctttgaaaaacgctgatcacaattagaatcatcatcggtaaagtaccggaaggtaattacactatccattaggtgattacgcttagtcgtgtaatcaacagctagattgacactagcacttgcagcttcacctaataaaagcgtatctggataatcctgcttaatctgctcacagaaaggccgcatccattcctgcacctgtggtaagttagcgaaaaatggttccgcaacaattggcttgttcacgtccccatctccagttggataattttgtcgcaaatctgccttgccaatatggataaaagcgtctaaacgcaaaccatcaattccttttttcagccaatactctgccacttccaacatagcatgccgaacttcgggatttttccaattcaaatcaggcatccgtttatcaaacaagtgaaagtaagattgacctgtgcctgctggatctggctcccatacactgccaccaaagaatgaaccccagttattaggtcgcttgccatcatgaccagcgaaaatatagtagtctcgataaaggctatcggggttcttgatggcatcttggaaccaaggatgttgatcagatgtatgattcaagacaaagtccatgatgaggtggatccctgccttatgcaaatccttgattaagttttccatatcttccatggtccccatatgaggatcgattgcgaagtagtttgaaacatcatagccgttgtctacttgtggtgaaacaaacacaggattaagccagacggcgttaactcctaaatttttcaaataagggatgcgtttgcgaataccattaaggtcaccaacgccatcgccattgctatcttgaaaagacttaggataaatttgatatataattgcgtgatcgtaccaatgtgccataattaatttcctccacgcatagtttaagggaaattagaaaccgctttcaacatcatatttattgttagcggtatcaaaaaagcacaactcaaatttgaattgtgctctttgcttacttctttttaaatatcatgttccaaacattccgccacttgctgcctttctcctgcaaatcagccactggctgcgttacctcaatacagccaagatattttccttgatcattatgcaaactataaaaggcaatgttcaccggaatcccatctttatgaatcataatcgacaatttaccacgtttgccttcgtgcatctgctttaaaactggcttaacatgaccttgactgtgaccgggatgaacttcaaagacagttttgccgatatctttttcagttcgcttaaataagcgatgtttattcatcgatgaccaaacaaccacatcgttttcatctaggacatccatttcctgaggaatagtctcaaagatagcatttaactgttcgacacttaaactgccgcctattaattcgattttatctgtcatttactttgctaaccttataacttcacgggcaatcatcaattcttcgttggttggtacaatcaatgcttttacttttgaatcaggcttagaaataaatttttcaccgtctgttcgattagccttatagtctggctctaagccaaggtagtggagtgccgacattacaccggcacgaacacctggatcatgttcaccaatacctgctgtaaatacaatgccatcaataccatccatctctgctgcatatgcaccaacataacgtacgacacgatttacgaaaatctttcttgctaatctagcatgctttttcttacttgccaacagatcacgcatatcagaggaaacacctgatacgccaagcatccctgacttatgatttaacatgtctactgcttcttctactgtcatactggtcttttgcataatatactcaagagcagatgggtcaaaatcaccactacgtgttcccattgctaccccagttaatggactaaagcccattgaagtatcaagtgatttgccgtttttaaccgctgtaactgatgcaccagaacctaaatggcaaacaatcaacttaagcgtatataagtttcttcccattagtcgagcagtacgtggagctacgtagcttactgaaataccatgtgcaccatattttctgatcccatatttctcataatacttataaggaattggataaagataattaacctgatcaagactagtatgatatgaagtatcaaacactgctacttgtggcacatccgggataatcttcataaatgccttaattcccatggcttctggcacattatgcaatggtgctaattcacccaagtcaaaaatttgttgaagctttttttcatcaattaaggcagactccctaaaaactttgcccccattaactactctatgacctacgcctgctagttcatccagactttttaatacgtgaaacttctttaaattttcaattaataagctaacagctgcttcctggtctggaatcgaagtatttttaatatattctttgccattcaacttaattttgaaaacagcattgtccattcctacacgatcagccatccctgaagcgataaccttttcgtctgggaataaaaaaagcttatatttaaatgatgaactaccagaatttattgccaaaacttttttcataatcgtgacctctattcatattttatctcttatttttagtatagcgctttcacctataatagaaaataattttaaaagcagttaaaaagcacctctgagttatcagacgtgctcgttattttttcgatttatctagttgattggcgccgaattagcttaggtttgagcattacttcaccttgaggtgaacccgattgggcaatcttttgcagtagcattttagctaacatttcacccatttcaaaaattggttgtttaattgttgttagctttggattagaaacttgatctaaaaagacaccatcaaaaccaataactccaaagtctttcggaattcgagcgccttcatcttgcaattgccgtacaacacccactgcaattcgatcactggcacagacgaaacaagtatcttttttaaattccttaaaatgttcatgaatcacatcttgcgcagcatgactatgattagaaacccgaaaaatttgtggtatcaactggtgttgttgcaaagtgttgatataaccagcttcacgtgaatattcaaatggctcttttaaatcaattccaataaagacaatgtgcttatataaccggtctaaagcatattgagtagccatcttctctgctaactgattatcagaatcaacaaagtcatagccgcggtgattttcaccaaataaaacaaaaggcttatcgagtttatcaaataattcataatctttgtttcgcgccccggtaattaaatagccatctgcatgttccttttcaatttgattaggatccgtaactaattgcatcgcatactgcttagtatttaaaccacgagcaaaaccaaaaagcaagttcatatagtatggctcagtggtatcaatatcttctaaagtgacgaattttaccacgttagtccgattattaactaaagcctgtgcaattgaattgggatggtagtttagtttctccattgctttttctaccattgctcttaattctggcgttacttgctcaggatgattaatcactcttgataccgtcatttttgatacatttgcttctttagcaacatctgataaagtagtcatattattcctattctaagtacatctttctgaatcggtttaaatctttttggctaaagccaagctcttttttgaaaaatccatcaaaactgccccagccttggcgaatagtttccgtaattccacgaatagccggtccctctcccttggtaatattcattttagaaactaggctagcaatttcattatcatcggggaactgtttagccaaagcaaagtcatacaattcattggtcaataaataatcacgcgaaatggtgtcatcatcaacacctaatgcagttaagatcagtgctgaagtcattccagttctatctttgcctgcactacaatgataaactagcgcatcttcttcaggtaattcaatcaattccgcaaaaattttagcaaattcatgttgactatgtgaattaagcaaaacctgctggtaaatttgaccaagccaattgtcacccatatcaggaatatgatggacaaagcgatataacttgttatcgcctttattttgcttgcggttttcagaataaatatgtgcatcaacaaaacggacatttgaccaaagcttgtcaggcgctgaattttgttcatacttagagcgtaaatcaacatctacggtaattcggcgttcaactaacttttcttgatcttccttcgacaaggagctaagtgaatcagaacgatatattttgttccactttacatgttgacccttgtcattttggtagccgccgatgtctctgaaattcagcggtcgatccaaagctaatattcgatcatgcttcatttttccttgcctttcctcattaaagtgttaataccgtacttttattatatcattatcagtcatgtgcaaataaccgagcagcacgaattgcacgttgccaacctgaataaagtttttcacgttcaactgcactcattttcggctcaaaggcctgtccaatcgtaaaggtatgctttaactcgtcaatatttttccaatagccaacggcaaggccagctaaaaaggctgcacccatgctggttgtttccagcgttttagcgcgttcaatttcaatccctaaaatgtcagcctgaaactgcatcaggtaattgttgttgctagcaccgccatcaacacgtaaagcaggaatttcaatgcctgaatcttgttgcatcgtatcaacaacgtcacgggtttgataagctaatgactgcaaagttgctttaattatatccttgtcagtagttccacgtgtaacaccgaagattgaaccacgagtctccgcatcccaatatggtgcgcctaacccagtgaaggcagggacaacgtaaacctcgttctctgatgtcgactcaagcgctgcttgttcagagtctggcgcatgcttaatcaacttcatcgaatcgcgtagccattgaattgcactaccagccacaaagattgatccttctaaagcataagtaatcttaccattaatgccataaccaatggtcgttaacagattattgttagagtctgttggcttgtcccctgtgttcatcacaataaaggcaccggtgccatatgtatttttcaccattcctggtttcaaagctagttgaccaaataaggctgcctgttggtcaccggccatcccagcaattggcacttgtccaccaaagaacatatatgacgctgtttcaccataaatctctgaattcgagcgcacctcaggcaacattttcttaggaatattgagcaaatgcaaaatatcgtcatcccacttgagcgtgtgaatattaaacagcatggtccgtgaagcattagtgtaatcagtcacgtgtttagcaccatcagttaacttccaaactagccaactatcaatcgtgccaaaaagcaactttccctgttcagctttttcttgcgcgccaggtacatgatcaagaatccagcgaatcttagttgcactgaagtatgggtcaataattaagcctgttttttgacgaatttcatcactgtagccttctttttttaatttttcagctaattctgttgtctgccgtgactgccaaacgattgcatgataaattggctcacctgtatccttgtcccaaacaacggtcgtttcacgttggttggtaatgccaattgcggcaatttgattaggccaaatgcccgaattaataaaagcattggcaattgttgtttggaccgccatccagattttattagcgtcatgttcaacccagccaggctctgggaaatattggtgaaattctttttgggcagaagcaacttcacgtccatcatggtcaaaaataattgctctagtagaggtggttccttcatcgattgctaaaatatatttttctgtcacagttattctcttttctacaaaagcgctttcttataatattactgtttttctgatgcagattctagcagttaatgtaatagatacggtataatttttataaggattttttaaggagggcattttaatggaaaaaaatcaaaaaattgcggtaacaattgcgggtaacgatagcgacggcagcgcaggcatgccagcggatctgcattcattctacgcccgcggtgtttatggcatggggctgatgacagccgctgttgctggcaataccaaaggaatttttgcccaacaaattatgtcacttgattttattcaaaagcaatttgatgtactaaacgatgatttcaagattaatgcgactaagacggggatgctcgccaacaaagaaattatcgactgtgttgccgataatcttaaaaaatatgacatgggtaaaatcgtgctggatccggtcatcgttactaagcatggcgctaccctgcttgacgacgatgcttatcaaactttcttagacaaattattgccgctagctgatgtgattacgcctaacttttacgaacaaaaaaaactgaccggcttagaattaaataataaagaagaaattcacgccggggctaaaaaattgcaagcgatgggcgctaaaaatgttctgatgaaagggcgccacgattcagatacgcaaactacagtaaccgatatcttgttaactgaggacggtgaattccacgaatttactaagccattctttaaaaccgaccgcgtaaacggcactggtgatactttatccgccgtgattgcggcagaattagccaagggcaagtcagtgattgacgctgtaaaaattggtaaggactttacctatgacgctatttctcacccaattgatgttggctcaaaatggggcccaattaatcatttggctgcacaagaagaaaacgaataactataaaaaataccgaagctcagatttgaaacttcggtattttcgtgtctattttatcttctttaggcctactatttttcctgaatctagaacacttaccttcgttaattggttattattgtacttatatgatgtaccttcatccgaaagacgtcttgtgggtggtcatttgaccactctttttttacgcaaaaaaacagcaatgaaatcaatcattgctgctaatttgtttactttttctcaattacaaaataatatcctgctgtcaaaatttggacaattccttcaagtgcaatcgcccaatctgcaccgaaatgcgctacgatcagtccacctaaaaatgacccaatcggaatcatcgacgacaaaatagaatcgttaattgtttctactctacctaaaatatgtgggctaaaactctcttgcaccaacacttcaaagttaatattcatcatcacgatccataattcggacgtaaaaaacaaaatcaacaataaaagcggcatccctttgggaacaactggttcaaggacaattgctaaacctgataacgtgagacaaatgacgactaacctttcaattttgcttttatcaaaagttagtcgctgtaccagtacactgccaactaatccacctattgatgaagctaattctaagccaccataactaattgccgatttagtcaaatgttcagtcgcaaaatacggcaaacccacagatgaaatgccgtaaaaaagattagtcactgcaaaaggcatgatcaaccgtgctatcttgtcttcttgtttcaaattttgccagcctttaagcaaatcttgcccataattttctgtgaaatattcattcgacttatttggaagtaataatttcctaggcaatattagtcgtgtataaaaagctagggcgcttgcaaaaaatattgcagaaataattaccgtggagtcaaatgacatccaagtaatcaataacgttgccgctgcattcaaaaacaaatccagcgtcttataagtcatttggaaaacgccatttactttagttagcttcgcttttgaaacgatgactggcaaaattttttcttcagcaggataaatcaaagttgagccaatcgttgaaatgacgtatacccctagcaaaagccaaatcactaaatcgcgccacaacttaacttgaaacagcaacgtcgctataacgctggtcactatctgcattagagttacaagcgtaagcatctttttgatataaacacgatcaatcagcggcccgaagacgaacgacaacatttcaattgatgagtctgcaacaaagattaacgacaagataagcggcgaatgaaagcgtaccttgaaaaaccacaaaatcgccatataaaatagcgaatcggcgatattggttaacactcgtcctgctaataatcgtctgacattgacattttctttttcgattaagttaaacattttcccattccttttcacaacactattaatgccgctgaaagccagggaaaattactattcaattgtagttaaaactcccagaccttcagctaaaaatctgggttgagcctcaagtagcgtttgacgaatgaaagaaaataattcattcgcaaacttaaacctaaaatgtcacgcattttagtcctcgctttctgtgaaaattaagttaattatagcatggatagcgacttatcaataatagtcattctatccttatatttttcgtattttcattcaatttcaaatcatgacttatgataataaccaaattaacttgcgctatttcctgcaatagttttaatagatcactttgtaactcaggatagatatttgccaacggttcatctagtaaaaaacattgcgcgccagtttttaaaacagcagaatataactttactaactgtatttcacctgttgatagttcatttatctttctatctaaaatcttttcaattctaaattgtggcgaatcaaaaacttttgcaaaatacttgcttttataaacctgacttttatcagaatatgatcctaaatagtccctcactgaacaattaggaagtggtatatcttgaaataaacaacttatatttgattctctcagttttcttttattaattaaatcagcatctataccatttatggttatttttccttcctttttcggcgtgtataggccaattattgttctgagcaaagtagattttccaattccatttctgcccctcacaatataaaatcctggagtaacaaaattggcagaaaaatttgaggtgaataagggggttttttcatctaaataaatattaaaatcctgtacttgaatcaaatttattttagaaattatttttttaccatcttgttcattcttcatggttagtaaattgttgattctcatccacgctactttaaacgattcaaatttaaataagatagaaaaaatttcatcaacctgtcccaaaagttgattaaaatattgaaaaataattgaaaaggaaccgattgtcatcttgccggaaatcactgataaaccgccattaataaacaatactaattgaaaaataagttgcaaaacaatctcgctattagacatatgtcaactaccctagactgaagtctagggcttagtggctcgttagcttgcgctaaccagaacaccaacttgcttagatacggacttgacttaccagcaatagtcttttgactattgccgatagaggtcgtctaattaccaaagccttttgagtccgcgagttgctaacggactacagcctttctaggctgctttttttattttaggattctgccacttgcctaatcctttttctaagatgttcactgccgcattccaatcacgaatatggtgcgttcaacagattggacaagtccattcccgatctttaagcgttagtttcttataaccgttttgtcccataatactgccacaagcatgacagcgttgagtagtatatttaggatcaattgttagaaattctttgtcatatagatctgccttataagccagcatgttcaggaagctgcgccaaccaacatcagaaatagcttgagataaggcatgattctttaacaggtttctgcttcttagttcctcggtaactactaaatcgtggtttttgattagtgcagttgagagtacttgtaaaaagtcactacgctgtcttctaatcttgtcgtgcagtttagcaactattagacgctgtttttgatagttttttgctagccgcaaattgcgtccttcttttttagcccggcgctgccggcgagacaagacacgttgagcgtgagccagtttcttttgggttttgcggtaaaagcgtggattagcgaccattgatccgttagatgctgtcaagaaattatcaaggttgagatctattccaatttgactctgcgtcttaggcaaggctttaacaaaggcaatatcgctgcctaactgcattgataagtagaactgctcgtcagcggtctttttaatcgtgactgttccaatacgagttggaatatgattaagcaagcgctctttgattagttttctaaagccggcaatgcggacaattcccagcttaggcagtttaacgtgctgagcatcaataaacctagctgtcccgttatcaagaaaagcttctttttgcttaggatattgacagttggtctgatatgaccagtcgctgcgttttttatggaaagttgggattccatgaccaatcttacgatagttgttccaagctttctgatagttttgaatcgcattggcaagagcgagactatcaatttctttaacacgtaaaaagctataagcatcgcggatattcttaggcttagctaataacgagttattaatgactacttcttctgccagcttagtctcataattattaagaatagaaaagacaaaaggcattgcttgatattgtctaacagctaaatagtgcttagcatgataattgcttcgattgcgtcctacataagagttgtatacaaagcgttgcgcatcatagtttagtttaatgattttcttttgcttagaactaggataaaagcgaagcttaacgccaaagtgataggctaaactgctcattcttttcatgtgtttcacctccttctgtagattagatatttatattttacaggaaagccgaacatatgtctctatttttttgaataaaaaaagctgactgctaggtcagcttggccctatccatccccgcattaagatacggggatttccgggcattttcattaaattgagaagaaaatctcgcttagcaacgcctaaaagcgttcttttagtattgctccatctctcagtttcgattttctctcttcgattaccttttatttcaatatatctgcttaaccattcagtaaaaccagaaaagtactcattataagcttctttcaattttaaactaacttcaaaaatcttagatcgcaaaaataaatatatgagactatatgcaggtaacaggatcgctattaacaataaaaaaccagacccagccataaataaatatgtaaaaatcaaaattgaagaaagggcgattgaaataatttgatttattgtttggaataaaaaagtcaacacttcagtagtatcttcagtaattttatctgctgtttgaaccgaattcatctttgtaactgctagcgtatccttcacatacagttctttcattattacatcattaacttccatgtttatttctctaaatcttaaaatctgaattttgttcataaaatatgacaacaaaagtctgataagacttaaagtcgttattaatacaatactacgtacaaaagcagccctatcagccttatatactaaggaatttaacagtattccttctaagtaaacattaaaagtcaaaatgccagtactgataatattcattcctaatagaagccaatattcaattttatactttttatcaattttgctaaaaatcgtatgcatagtgtcacctaactctgactagcagtcaaaaatgttaaaatataatgaatataaaattagataaattttatattcttatttatcctatgtcaatactaaataaattgatttggttttactttcatgctgtatttgatattatgtagttactaactaccaaataactatctatcaactacagaaagagaaaaatatgactgaaaaagcagcaattaacatccgtgttaataaagaaactaagcaaaacgcagagaaagtattaaacaaactaggcatcccgatgtcagtcgcaattgatatgtacttacgacaaattgcattgactgacggcattccctttgatctatcttccaagaaaagaaaaaagaaaaatgatcacgaaacagcaatgatggtcgcagaagctacagctcaatatgaaatcgttaaatccaactgggaggataaattagctgagtttattcctgactggatgaacatgaataagatgactaaagaggagcttgaagcaaggttagctaagcatgcccaagatgcaagagatggtaaaagtgtcgagattagcaaaacttttagcgacctgaataaagaattaggaatttaaatttcatacaagaatatactgtcaaatcaagtcctaacgtatctgtagaacttaaagagatatatagctctatcttgcaattatctcgatctccaaaaactgctcgagattatgtaaaagatcttgaacaaactatgcaagcgttaaattattttccagaaagatatagaaaaactccttcaggaaaataccgacgagttaatttcaaaaaatacgctatattctactttatcgaaaacgatactgtacacattattgatgtcatactagcttcatcaagtacagtattcaaatattaatcctttgccccattctagctattaagctatactagacagaagaaattaaacaaattaagggacaataaaatgagcgataaattaattaaaattgcatacctctacgaagatttaatgaatacttacggtgactcaggcgatgttaaaatcttgagctttttgctaaagcgtgaaggctacgacactcaagtcgacaatatttcacttggcgatgacttcaatgcctttgactatgatttcgtcttcttcggcggtggtcaagactttgaacaaaccgttgtagccaaggatttaccacggcacaaagaaacacttgataaatacatcaacgatgacaaacctatgctctgcatttgtggtggttaccaactaatgggtagttactataagaccaactcaggtgtaacaattcctggcttagacattttgccacttcacactgtcttcaagagcgacaagcgaatgattggtgatacccgttacatgaccgaatggggcgaagttaaggcttttgaaaaccactctggtcaaacttacttcgacaacaaggacaagttgcatcccctcggcgacatgatcgaaggctacggcaacaacccacaagaccacgtcgaaggcctgcgctatcgcaactttattggttcatactcacatggtccactacttaaaaatactaatgtagctaatgccatcatgaaaatgattatcgcttggcaccaagaacgtgttagcgaagccgaaaaagtcacagaataaaaaagacccagtcagaatctctgactgggatttttcattatcaaattaatttaaaacacgtttagcagctgagggataaaagtaggcactgatagcctgctttctcaccccttgactaggagttgcagcgtgaacatattgtccatcaccaacataaataccaacatggtaaggagctgaggcagaaccccagaacaacaagtcgccttttttaagatgacttaatgatacgcgtttacctttagtaacttgaccataggtggttctaggtagtgtctttttagcagcctttttataaacgtattgagctaagcctgaacagtcaaaggctgaaggaccagtagccccataaacgtaactcttaccaacttgttctttagcaagttggactacggcgttacgtttttctgttttgctttgactagctgcttggacagtttgcgtttgaagtggaacattaatgaatgaaattcctgtaaaaaatactgacaaaactgtggcaaacttaactaaactacgtttaaaactcaatttatttctccttaacacttcttatctttcaatgttttctatattaccggagaaatattacagccttgttttaaaatgactactataaaattaagcaatgtaacaaaatctgctatttcttgtaaattttgcttaacttgaaaaacactataattttctatatgcttaatacattaatttaggagttttttattatgaataagatagatagttatgtacgccactttttaatactaatcgcactaattttagggctttcactcgtctcagaactgcgtgaaattattgcctatgactcatctacccttggtatcatctttttaactgctgcaattatttgtacttttgcttcaggaatcacattacaatttcataaactaaattggattacgatcattttaattctgattctttctacgattatgatcttattctggctcaaaacccacacttttggccttattgtcagcatttttatgatttacaatattattgtatttctggtttgtgctattaacctaatttttcaaaatgatgctgaatgattaaatcatatgcttaatcataggtaatacaatcccaattaccactaatccaccattaaacaaaaaacttattaatttcttttcaaaaaagtatttcttcataaaaaaagacctttctattatgaataatcaaatcttcgggctaaaattccgacaattacgaaaacaacaacatatcactttagccaaagcagcagctggtataacttcaagacagtctctaggtaactgggagactggcaaaggcgaattagcatttgagaaagttttactgctactaaaaaaaatcaacgtccagccaatagactttttagagagtagtataagtagttacctcaaacaaactacttcacaaatctctgcagcttatgttaacaaccaagttgataaattattgcattatgctaataagtatcttgacataagccatcgtaatcttacagacagagttagctttttacgagctgctgtggcatgcaattattacatggacctaacgagtatagatctaacaactagttctgataaactacggatcatctcccattttaataaaatcttgaatggagaagaaatctggaattttgaggatatttattttttaggaaatacacaaaatctgatgagtccacgtgacatttatagtttagcctattctttaaattattatcgtcaaaagcacaaaaacgataatagagaatggatcaatgccgtttataatactttgataaacgctgaatttgtacttataaaaacaaatattaaattggctactgatttagacttacttttaagacaaaagtgggatttaccagataattatgctttcgaaaaaattcgacaaaattttatgcatgaactgctaaaatatatttcaacccaagatgaaagtgcaataactcagcaacttcacattcttgaattagaacacctatctgatttaaaaactggttttgaaacagcatatgaacaagtaaataaaatatattttcaataaactctcctcctagttagtaatattatcttatttctaatattgttagcgctttttgccaatattttagcatttttctttttacaaatattagccatgatattttatattcgtaaactaattaagattttttgaggaggatataaagatgaaaaaatcaattaaattagttaatgtactttctgttagtgtactgactttaggacttgtagcacctgtaaccacagtttctgctgatactgctaattctgagaatatcgcagtaaaaacaaacaatgaatcaacacaaagtacagatacatctggcttagaaatctatgatcaatacgttcaagtaaatcctgaaaaaaatcaattcgaattatccaaattaggtgaaaaggttttaccaactactgtatcatcacagattcagagtcaattaaatgctaccaataaagaaattaaggctaataattttattattgaccctgaaaccaaagcaattgtaaaatactcaccttatattaactttgctgctagcgttagtggcgctgcgcgcttaagaagcggatgttatgttcgatggttctggtggggctttagattctactttacttcaaatgcagcagtaacttggtttagagggattttaggtggcgcttctagtggagccaccataggaaacttagtagctgctgcaacgggccatgctatggctgcaactacaatagaagcatttggtatgtacgctgatagtatgtctagagatttgtatgattataataaaaaacaccgtcgtagtaaagtatatatggatctgaatggtgtatttcaatattcatttcatacattctaaaacatttggagaaataacatggggattaaaactttagtatccgtcattttaatcattatagtcattgtactagcctgctcaccattttataaaaaatatcaattattctatttaaacaaagtaggctattgggatatcctaatccaattcctagtaattgcaggtatcaacttcttcatcggtttaaaatatggtctgggtgccctgtttttattgattgttcccgttccactagacattattttcttaatctcaatgatttattcttaccttaaaattagaaaaatgaaacgcaaatagctcttaaaaaacgaagcaaattattgcttcgttttttgattgatcttatttttcttctgtttcggcgttagattcaaagccatcgcagccacgacaaccaacactgatccgacccaatccatcggcatcattactaacccaaagaaaaggacagaaccaactgtagctgaaaatggttcaaaagcatctaataaacttacagttgatggaattacataccgcagcgcgtttgccataatttgaaatggaataatcgttccaattacaataactgccgcagtatacagccaaacttcaggcttattgggaactgcatgaaattgcggatcaattatcaacaaactgattccagcaaaaatcatcccccaacctgttactaccatactagaaacctttttaacaatgttaaccggaatcaaagtataagcagcctcaccaaaagcagacaaaacgccccaaaacagtgcaactggcgtaatggccaaatgattaaattgcccatgcgttgacaataaaaacactcctaaaaaagcacataacgccgctatgatatccaatctacgcataacttgcttgtgcgtgatagctaaatatcccaatacaaaaaatggcccaataaattgcaagattgtcgcaatcgaagcattagccacttgaatacacataaaataaaatagctgcactggcaataatccaaatatgccataggctataataaccaaaacattgtgcttatttttcaacgtagctattggtttttgctttaaaaatcctgaggcaattaataaaactgctcctgaaataatcaaccgaatttgtgttaaccacattggtgtaatcttcggactaatatcaaacaatcctttagcgaataatcctgacacaccccacattacagctgccattgctgctagaaatgtccacaatcttcgtgtttttgctggtaccatctcgttcacctttttctttctcattcacctaataattaaaccacaaaaataaggatacctactgggcatcctcaactttattgatgagtttttttaactttctttttcttaggtgaaatattcaaggccatagctgccagcacaactaaaatcgaaccaatccagtccattggggtcatcaccaaaccaaagcaaataactgaaccaacggttgcagaaaaaggctcaaaagcatctagcaaacttgccgttgatgccttgataaagcgcagcgaattagtcatcaattggaatggaatcagggttccaatcactgccaccacatctagccatatatgtggcgtattcggaatatgcggcatctgtgggtgcacaatcattaggcaaattcccgctgacagcaatccccaacctgtaacgactaaactagaaactcgcttcaacacactgattggaattaatgtattggtcgcaactccaacagctgaaagcaaaccccagaatagaacgctaggcgttaaagcaaagtgattaaaacgcccatgtgtcgccagcaatactacgccaataaaggcacagatggcagcaagcacatctattcgccgcattacttgcttatgcgttacagctaggtagcccattacaaaaaagggaccaacaaattgtaaaatcgtggcaatcgaagcattagcttgttgtactacaataaagtaaaacaattggactggtaataaaccaaaaatcccatatgcgataatcgtccacgcgtcatgcttatttttcattgtagcgattggcttttgctttaatacggcagctacaattaacaaaataatgcctgaagttaccattctaatctgtgatagccacattggtgtaatctcaggactagtattaaatagactcttagcaaatagacctgatattccccacattacgcaagctaatccagctaaaaaggcccacaggcgccgttgtttttgtgtaaccattctttttaatccccaacttttctaaaactaacatactctatcataacaaaaacgggctagcttgaactagtccgttaattttttattcatcgtttttcttaattgggtttctgctaggcattagctgcatgaatgtagcaacaataattaaaaagccaccaagcatgtccattgggccaaagtccgcatgaagcagtgaaactgacaggatcgttgcaatcagtggctcgagggctccaagcatccctaccgtacttggttcaatatactgcacactagataagtacattgtataagctaacaatgttccaccaataataatataaacaattacccaaacatcaactggtgcaagttttggcattggttgagtgaagtaaattggtaaaaaggcaatgcctgcaaccaacattgctgcgccgattactggaatcggcccatactttttgaataatttcccaggtaatactgtattaatcgcttcagaaaaagccgcaattaagccccagaaacaagcaagcggtgataaagcaagttgatcgaatctgccacctgtagccaagatgaaggttcccacaactgctaccacaattgaaatcgcatcaattcttcgtggccacatcttacttctcaatgaagaatatataattatgaaaactggcgctaaaaattgaatcaccgtcgctgtcggagcattgctgtacttgactgctacaaagtacgataattgtgagctccccattcctaagaaagcaaaaatgatcaacataatgattacttttttatcatgtagcattgccttgacttggtccaagtatttccaacaagcataaatcataagcagggcgcctgaaaaaagcaaacgcagacctacaagccaagcagtatttacattagtgctagaaaataaaaattcaaccgccgtacccgatgcaccccaaaaacaggcaccgacaacagctaaagtcaatcctttataacgctgattcacattcacacatcctttagattaatgtttttcattgtaacatgggctaaaggaaaagttcaatgcttctaaagttgatttaatctatataacgtataacctgacacgctagccaataagccgattgtaaaaagcaaccaagattctggatgaaaggcaattaaaacaagtgaaagaaagcctgctgctaaactagaattgcgttccattcgctttttgccaaaaagcagaccgcacataatgccaaacatagttagcacataaaatgagtcaactaacagtaacaaattctcaataattgctagatcacttggctttacttttacactcaaatcagtaaaaatctgagcacagccaaaaaataccatcacaaatgcagctaagatcgtgataaagctaatcgtacgaaaaactgacttcaccttttgagttggcgtttcatcgataaaggtttttaagaaaaactcgtgatctttttttgctactacagctctgcccgtcttcttgtcataccagttcaatagaccagaaccaattagcataatagcaatcacagcaaactggatgacaattaaacgcatgaaaattggaaaggcatagattaccgtcaataacaaaattactatatagatcagctctgcataaagaaagaaatgcagacgctgtttatttttgaaaatagtttggaatgtttttgaattaggatcttgcataagacttctccccactaaatcttattacgaaaactcaaccagaaatttgccccactgagaatcaagccaataacagtggctacttgcatgcttggctgcatgaaaagcaagatcagtgataaaacaacagttaaaacgctagacgcacgaattaatttacgatttccacctaaaataccgacctccacacaaaagagtaaaacaacatataggccatcaccaatcagccaaacattttcaaagagattggcaaaattaccggtaagcggcttagccaaaatgtcagtccaaagctgacgtgcaaaagcaatacttaaaccgatatttgcccaaaagagcaagaattcaaataagcgaagaaatacgtttttagtaaatctaatactagtcagtgtttcccagaatgtatcgtgttttttaatcactatccttcgatcaagaaaggcaccaattgaataataaatcagaattgcaatcccttgaaatgcaatcaaatgcataaaaactttaaagtcaaacatcaatgtgaatagtaaaactactacataagctaactcaaaatataatacacagcgactaaactttcgctcgctaagccagtgcttcaattctcttttattcatatgatcactaatattgccattcatattttcactctcttttaataattatctaattatgtaaaaattgtataatgatttcaaaattttgtctagtccttttataattgatttagtaaatatttttcgaggtaaattatgaattatcccattttaattactattttgatcttcttgctgtgctttggccgattcatttggatcattactcacgaacgtcgttccttacgcgctggagttagcttagttatcaccttatttagttttttatttttaggtgtagtcattctggttaatatcgctgaccttgatccacattacaaagactggattttgccattatttgtgattgcgctatttgctgtgatggctggaacgattatctttgcattaactttgatcattatgtttttctacgatggcattaaaatcattatcaaagaaggaaaccgctggacaaattatctttctctgggcatggggatttccattatcttcttcctatttttatatcctcttgtgggacgaattagtcatgatagctggttaaagtatccttatatttttctatggctagtcatcatctacttagtcactatcatgatgatgtatactttaacttcttggattaatttaattaattggcacatgccgcacttagactacatcgtagtgttaggcgctggcattatgggaacaaaggtaacaccacttctggcagcaagaatttcccggggaatagaaatttatcacaaaaatcctggctctaagttaatcatgtctggtggccaaggacctggtgaagacattcctgaagcagttgctatggctgaatatgctgaaaaactgggtattaataaaaacgatattattatcgaaaataaatccaaaactacccagcagaacttgcaattctcacatgcactgatgaaaccaaatagtcgcttctgtattgtaaccagctcctaccacgtgtatcgcgctctggttttagctaaacgtcaaggactcaagtgtactggttatggtgccaaaactaagtggtattttactttaaatgcttttgtgcgtgaattcattgcatatctggtaattactaagaaaatgcaattgactatcatcggttttctagcagctatcatgattgctgctgccgcatttcatttttaatttattgcgttaagttgagaaacttagcgttttttattgatttatcttttaatttttttataattatagtcaaatctatagaaagcaaggtgtaactatgaggattcgtaaaaacaacttgtcaaactgtcattagtcaggatgacgagtcctgactttttcaaaaaagcaggttacttatgtcagaaacaaaattcaataaaactcttcttagtgtcagtcatgtggatttttcctaccctaagcgcaatttattcaccgatctaaatttttctattgctaatggtgaacgtgttgctctagttgggcctaatggaattggtaaatctacactaattgacctaattcgtaagcaaatccaaccagatgatggacagattatttgtcacggtgaaattaattatgtacctcaagtcaatgatcaaactgtaattaatgactcaaagagcgctggtgaaaagcgattagctttaattgaaaatactatttggcttcctagttctcttctcttattggacgagccgacagtttacttagatgacacaaatatccagaatttactctacttactcaagaattatgatggagcaattctagtagctagccatgatctggattttatcaaccaactatgtgagagaactattattctgcagccaaataatgcagtttattacccaggaaattacgcacagtatctcgaacaaaaacaattagataaacaagccgtatacaattttaacgaaaagcgagatatattaaagcaacaaattactgaaaaagtctctactttaaagcaaaaaagtactgactataatcattttgctaaaacacaagacaatactggtcgctatccttcgcgaagccatgatcatgtccaaaaaggattaaatagtcggcttaagcgagctgaacgtgaactggctaaacttccagagaaacagcacctatatcaacatcaacttaaacttcctgaatttaaaaagtggccgactaaaatacataattactctatcaaaatagatcaattactcagtccccaaaataagactattatctaatacacagttaaacttgcaaacagccgatattattggattaatcggccccaacggctgcggtaaaacaacattgctcaaatatttagaacactacattaatcagcagcaatctttgccaccagccagctacattggtttaaatacgactaaacaaaagaaacctgccacagtagcagatttctttcacgagactattttgagcaaaactgaagttaagcgtcttttagttaaaatggatatgtttgtcgatttgactacaagactcacggatttgagtggtggcgaatttgctaaattagcattaatcaagcagctataccttgaacaagaatctattctattacttgatgagccgactaactatcttgatccagaaagtgtgacggccttggcccaaatgctaaaacagtcgcatctcacttgtattattgcatcccacaattgcaaatttttaacccaattttgccaacaaatctataaaattaagcagcaaagactaattgaattgcactaaagcatttctcttaaacacatatttgctaagcatatcctttactatcctcatctatattaatgaagatcacatttggtgctgcagaagtttggtgcgtttctttattatatttaccaccataatactcataacgaggtttccccttgccaaaaggatctattcggcaaagaaagatcacatatgtcgctttgaattctttttccggagagccacctagcccgccatagattatttcttcctgataagcgttggcaacttccagaatgttttctcctggttcttgcgaccctacttgaatgattaacccgtatttattgcgcctcttgtctcgcgcaattacatgtacgattgctttttcatctaagacatttctatttggatcatcaagtgattttgcttcctgaatattgagttcgggaagcattctttgtactgctgtaagaagctgctcattatacttcttcataattcctgcggccatgtgatccaccattgccggtgacatttcattttctaacataaaaaaatcctcatttctaaaaatctgagagttttatccctctattacttattacgcaaaaaaacgcaaaaattttttcggaaatgaagttttttcaattttttagttttcttttctaaaaaatggactgagtagcgatacaagcaggccgtaaataaaataccagcgataaatatctgccaagtcttgattttgaatccacaaaattattgcaattactgtcagtaagccacctaaaaagattgttgaacccatatttttatcagtaaagaagctgatagcagcacctaaggtaattaacgctaccaaactataaatgacgataatcactggtcctttagtctgaacgttaacatcaagcattggtgcgttagtaaacagctgccacacgataaaaccagctaatgcaatgccacatagcaatactagtaatctaaaaacaaaagttaaagtctttttcattatttttctcctgtatgcataataatactagtataacagcaatatcgcggcatacgaaaaacgcttggatttttccaaacgcttttttactattcttttgcttgcataaattgttttctagtgatgtatttgattgatttaacgtattgccccttgtgttgaattgaaatatattggcctgatggatcgtagccgccaacctttttcaacaataaattctttttcgtcttaggattatacgccttcacattgtaataccgctgtgtgcctttatctacttgagcatagcttgtttcctgggaaatgaatggattcaatctatcagtaaaagagttatgaaatgaaaaaatgcagattactcccactactagcactagtgccgttacaaatgcggttttaatagtacttttattcataatattcaccttcatcgttcaactattgttatactaaaatagtacaccaattcagttactttaacaattgtttctagcaaaaaaacgcttgaaaaattccaagcgtctttcacctaagccaaaaatctttttatagcttcttctacactagcattcaatgattggtgcttcgttgcagcataattagccaatttttcatgtaatgaaggatcaatgcgcacattaaaattacctttaaaaggtttctctggtataactccatcttccttacagctcattagataatcatcaatggctccttgaaaatccttctccaattcatctattgtattaccttcgtaagaaataagactcttaatcccctgaaccttaccaaaaagaatcttatcctccaaagtatattcaattgaaccttcataacctttatacttcatatattgattagtttttttcatctttattcatctctttgattttatcttgaatttgtttgatttgatatggtaatagttcttttctaggatgtggtttatgaagaatgatccgatcactgccctttttaaaaataattctagatccactcgtttttcctttattatcgagttgataatctagttcatgcaatagtgttttagcatctttaaagtcaaacgttctgagactgtaaaatagtttgtgtaaggatgaatgattccttaaatttatttctttaaacattagaaaaaggagttcctttctcgtatgattggtttgaacaaaaaaaacacatacagaaagaagaactccttcatgaatgattttaccaaagattttgctcaagctctattcaatccagacaaaataaatgatttattgcgcaaagaactacaacaggctgttaataacttgctagaagctgaattgactgcctttctgggctatgatccctatgccagaaatggctggaatactggcaactctagaaatggtgcttatttccgcaaagttgatacgcaatttggcccaattgaagtgcaagtgcctcgggatcgcaacggtcaatttcatcagcacacgctgcctgactacaagcagcactcggatatcttggaaagcatgattatcaagctttactccaagggcgtgaccaccagggaaatagccgatctaattgaaaagatgtatggcagccattacagtccagctcaggtatcaaatatttccaagcagatgattccaaaggttgaggcttaccacaaacgcaagctaagcgacaagtttttctgcgtctatttggatgcgacataccttcctttgcgccgagaaacatttgagcgtgaagcagtctatattgccattggcatcaagcctaatgggcacaaggaggtcattgactactgcattgcgcctagcgagaacattgaagtctggacagatatgcttcaaaacatgaaatcccgaggcttaaagcaagttgagctttttctttctgatggtgttgttggcatgaaaacagccttagctcagacttatccaaaagctcattttcaacgctgtttggttcatgtcatgcgcaatatctgcgctaaagtacgcgtcgacgatcgtgaaaagatcatgaacgaattcaaacaggtgcatcaacagacaaacaaagaagaagccacagctgtcctgcatgacttctataccaaatggggcaaggtttacagccatgttatcagaagcttgaaagacatagaaccagatctgctggtcttttataactatcccaagcagatcagagcttcaatttattcgactaacatgattgaatcatttaacaatgtgatcaagcgcaaagctaagcctaaggcagagtttccaactgaacagtcgcttgatgcatttattggcatccaggcaatgagctacaatgaccgttatttcaatcgaattcataaaggctttggtcaggttcaggacaccttagaatcctactttgattaaataaataattaaaaaatcaatttacgagaaagaactatttacacaaaagatttgacagtttcaacgttcttggatgactatataactttattaatagcttttctaatttactcacgttatcctcacttaagtatataatataatatatcatttgtaactaaatttgcaactaagacaaattatacctaattcgctaaattcacgctactaaaaaagcgcttggaaaattccaaacgcttcttttgtttaatcatctagacctaacttcttaaagatatcatcaacatgacgcaaatgatagtgataatcaaatgcatcatcaatatcttccttggataggtaattcataatttcactgttttcaaccaatggcttaaactgcttttgctcattccatgatttagcagttagcttctgtaccatatcataagctttttcacgagatagacctgcttcatcgatcaacttaagcaacactcgttgagagtaaattaatccatatgtacgatccatattcttaagcatcgtttcagggaatacatctaagttagtcaaaattcgattgaagcggtgcaacatatagtcgacgccaatagtcgtatcaggcaagataactcgttcggcacttgaatgagaaatatcacgttcatgccataacgctacatcctcgtatgctgtaacgacatgtccacgcattactcgagccattccacagaggttttcagatccgatcgggttacgtttgtgtggcattgcagatgatcccttttggccagcgcggaaatgttcctcaacttcatgaatttcactgcgctgcaagccacgaatttctgtcgcccaattttcaatactagtagcaatcaatgctaatgtcgcaatgtattctgcatgcaaatcacgaggcaatacttgactagtaattggctgttgtgtcaaacctaattgcttcattacgctagtttcaactgcaggtggaacattagcaaaagtaccaacagcacccgaaattttgccagattcaacgccttttgcggcatgttcaaatcgttcaatatcacgattaatttctgcgtaccagcgagcaatcttgagaccaaatgtagttggttcagcctgaacgccatgtgtacgtcccatttctactgtgtacttatactttttagccttttctgcaatagttgcttttaattcgtgcagatcttttctgataatctcatcagcttgtttaagtaagtagccttgagcagtatcaaccacatcagttgaagtcaaaccaaagtgcacccattttttctcagggccaaggctttcagacacagttctagtaaaagcaaccacgtcatggtgggttacttgctcaagctcagccacacgctctgcagtaaagctggcattcttagcaatcttctccgcatctgcttctggcacttcaccgagttctgcccaagcctttgttgcggcaatttctacttcaagccaagctgcatatttattttcgtctgtccaaattttccccatttctgggcgagcataacgttcaagcataaattacatttcccatggattcttcaaaacaatagtttgttcacgatctggaccaactgaaacagttaccaaaggaacgccaaccaactctgaaacgcggttcaagaatttcttagcattttctggaagagcgtcccaagtcttaacttgagtaatatcttcatcccaagctggaagttcttcatatacaggcttacatctgtataattccttcaaacttgctggataataatcaatcttttcaccatcaagttcatatgcagtacaaatcttgatcttgtcaaaacctgaaaatacatcaagcaagttcaagctaaggccattgataccagcaacacgctttgagtgacgcaatgcaacggagtcaaaccaaccaacacgacgtggacgaccagtaacagtaccatattcatgagcagtttcacgaatacggtcaccaacttcatcaagcaattcagttgggaaaggacctgcaccaacacgagtagtgtaagccttgcagacaccaattacagtatcaagacgattagcacctataccaatacctgaacaaataccaccagaaatagtattagatgaggttacaaatggataagtaccttcatcaatatcaagcatcacaccttgcgcaccttcaaataaaactttcttattttggtcaagtgcatcattcactaagacagaagtatcagttacatacttcttcattctttgaccatattcatagtatttatcaaaaatgtcttcaaatttaagtgctggcttaccataaaccttagtaaataattcattctttacttcaaggttagcacgcaatttttcttcaaaggtgtctttttcaagcaaatcacaaacgcggattccaattcttgaagccttgtccatgtaagttggtccaataccattcttagtagtaccaatcttgttagcccccttagcttcttcttgatattcatcttgcttaatatcataaggcataatgatgtgggcacgattagaaattctcaagccactagtatcaatgccactcttttcaagattttctaattcgccaaacattacttctggattgattacgacaccattaccaataactgtattgtccttggctgcaaaaataccagaaggaattaaacgcatcttgaaagtttgaccattaatatcaatagtatgacctgcgttgttaccaccatttgaacgaactgcaactgcagcatccttactcaaaaagtcagtaatctttcccttaccttcatcgccccattggcttcctacgactgcgactgctgtcatttaaaattcacctcataaaaatctctataaatattacgtatgctagtctagcaattaatttacaaataatcaatataaaatccgaattattttatttttaaattatttcatagttcgatttttatattgacaaacacaaattattcccatatagtatgtctcggtcaacaaacaagattaaagggagcagttttaaaatgagtaactactttagtatggaagcctttgactatgatgatatccaacttgtacctaataagggtattatcaaaagccgtcgtgatgcagataccagtgtcaaattcggaaaccgaacatttaaaataccggttgttcctgccaatatggaaagtgtcattgatgataaccttgctatttggctagcccaaaacgattattattacgtaatgcatcgttttgaacccgaaaagaggatttccttcatcaaaatgatgcatcaaaaaggattattcgcatctatttcagttggcattaaagacagtgaatatgattttattgatgaattagtcaaggaaaaccttaaaccagaatatattactattgatgtagctcatggtcactccgtttacgtgattaagatgatcaagtatattaaggaaaaattacctgattcatttttaacagcgggcaatattgctacgccagaagccgtacgtgaactcgaaaatgcaggcgccgatgcaaccaaagttggtgtgggacctggtaaagcatgtattaccaaattgaagactggctttggtactggtggttggcaattagccgcattaagaatgtgcagtaaatctgcttctaagccattaattgccgacggtgggattcgtcataacggcgatatcgctaagtcaattcgttttggcgctaccatggttatgattggttcaatgctggccggtcatgaagaatcacctggtaatgtaatcaaaattaatggtaaaacttacaagcaatactggggctcagcctctgaggttcaaaaaggtgcttacaaaaatgtagaaggtaagcaaatgttagtgccataccgtggctcaattaaggatactttaaaagaaatgaaggaagacttgcagtcatccatctcatacgctggtggtcgcgatcttaattccattaagttagtcgactacgtaatcgttaaagacaatatttttgatggtgataagtaattttaataaaatttttgcatttttattattttcctgttaagaatattacgataatatagtattatctatcttttttcgatagaataatataagtcgagttattgtagggtagtcaataactcggctttttttgattattttttaaaaacgattggacagagttttaaattgtgttatactagttgtcgttgatgaatgcgcccttagcgcaactggatagagtgtctgactacgaatcagaaggttgaaggttcaaatccttcagggcgcacttaaaaacgggaaatggctcagtttggtagagcacctggtttgggaccaggggggcgcaggttcgaatcctgttttcccgataagttagccgcacttcattgaagtgcggtttttttgtgtaaaaaaataagtattccctcggaaatacttatcatgctatgcccctttagtagctcgtctaaagataatctgtgtatctgaatctacatatttcaataacggtaaatcgtaatccttaacctgggccaaaacatttactttctcattgcatggcaaatcgcgtttagtaatctcgatttcgccttcataacgcggatacaaatgattatcaatcgtcacgctgccagttggtctagcataaatattatcttgcggctctgttgacaaaaacatcttttttctgctttcctttaagcgaactacgtcacgcgccacatctggacgattatgccaatcattaccaaacaattctggtatatcagtatctaaatgcagtgtaattgcaccctgtttttgataattagtaatcgattcaattgcatccctcgtaagttgcggatctcccacaaaaatgtgatcgcaatcataatctttcaattctaagatcgcagctaatgggttttcatatcgctgcttctccaacgttggcaatcctgcaaaaattggtccacgcaatttgccatttcctgaaataaaggctgctgttttcaaaccatattgcttaagccactcattcttcttttgcatccagtgtgcatcaagacctgtttcaggacgtgggtagaagttatgtcctgctgttaatttttcaaaatttgcattgctataacgcagatcatcaatattttgttgcgtaataatgctggcatttagaactatcggcatttctttggacaacttggcaataatatcagtagaaaatccatgatctactctaagaccagttagactcaaacttttaatttgctcaacactattgacattaatacccaaatcttgcagatcatctgccgtgacatctgcaataattttcaagtctagtttttgacaccaattagttaagtccgccagccgatttaaaatcgtctcactatcagtatcaggtacagctagctgagtaaaaacgcaggtaaatccactattgcgcatcgtcagcaaataattgtaattctcggacgtcaaatcgtgtcctagataaacagaaaatcctaacattcttattcctctaaaattaattaatttcttttattatctatagcttaaacgctttcttaaatatcttactacattttttgcttgcttttttctaaaaaataatgttaaatacatataaacaaattaaaaagcgatgaaaaagacgagtaaataatctaattctttccagtgaattagtgctagtgtgaaactaatagaccctggattattgaaaaacacttttagcagctcactgaaacaataattcttagagtaggttgagacgtctccggtacgttaccacgccggtggagcatgatagtgcttcatgagtcggtctattaaaatatagacaatgtgggtggtaccgcggaaaaaagcctttcgtccctgtttttttagggagcgaagggctttttctttgctctaagtacattagaaagaggacttatattatgacacttattttacctaaagattatcacccaacattaactgtgcgcgacactgaagctgcgattgtatttattcgtgaaaccttccaagataaattggcagaaattctcggtttacaaagaatgtcagctccaatgtttgtcgaaaaaaagaccggcttaaacgacaacttaaatggtgttgagcgtcctgttgcctttgacatgaaggcaatgcctaaagaagatactatcgaagtagttcactcattggctaaatggaagagattggctttgaaacgctatggtttcggaatgcatgaaggactttacaccaacatgaacgccatccgccgggacgaagatcttgataacttccactccatctatgttgaccaatgggactgggaaaagattattagtaaacaagaacgcaacaccgacacacttgaagttactgtgatgaacatttttaaggcaattaaggcaactgaaaagctggttgctgcacgctacccaggctctacttatcgcctagctgatcacgtttcatttattactactcaagaattagaagatcgctggcctgatctttctccagaagagcgtgaagataagattgctaaagaagaaaaagccgtctttattatgaaaattggtgacaagttaaagcgtagtggtgaaccacacgatggccgtgcaccagactacgatgattggcaattaaacggtgacttagtcttctggtatgaaccgcttaacagtaagattgaaatctcttcaatggggatccgtgttagcgaagaaagtttgcgtgaacaattgaaaaaagctcactgtgaagaacgtgagaaattaccattccaccaaatgcttttgaagggtgaattaccttattcaatcggcggcggaatcggtcaatctcgtctctgtatgttgctgttaggtaaggctcacattggtgaagtacaagcttctatttggccagaagatatggttgaggcttgtgaagctgacgatattaagttgctgtaattttaagatttttttacataccaaaaaagatcctgcaaaatgatacattccctgtcaagtagacagtagaattacataaagcttttattcctcagttgattaataatcagctgaggattttttggcttctcttattttcttttcgtgtattttttgccagtatttctcaattcgatgatttggtgcaatagggcaattcttaatattgcctttcatcgcttctttgcgcatttcaccagcagttaaaccgttaaaacgtttctgtggatcttcattaatgtagtaatctattgtcttacaaatagaatcattaagttcatcataactggccacttgaggatgaagaataactcgcatttctttgataatgccttgccagccttccattggaccattatcaatacagcagccaacacgagacattgattgcgtcatgccttggtcttctaattggttttggaaaggtgcgcgagtaaattgaaaaccacgatcactatggaaaagcggatgagcattagggtatgctttaacagcctgcttataggctgcttgaactaaagcagtatcgtttcgtttactaattgcgtagccaacaggatagcgatcatatagatcaaacacagtacatagatatgccttaggcaggttagcagcaacgacttcagtgatatctgtacaccatttttcattaggtctagatgcattaaagtctctttttaacttgttttcggccgttttctcaggcgttgtatgcttgaactttagcttctggtatctaggcttttgtgatctaatgccattgatacacatcaagcggtaaacagttttatgataaaccggcttttcatcagacatctgtcgattaactgccatggtcatcttttccgtcccaaacagactgttgttagacttagttatttcaatgatctttgcttcaatctttttgtctcgttcttcacgcttactcggcttgcgcttaggatcaaagtatttgtaataagctgagcgtgctattttagcccatttgcacattaaatcaatcttctaattgtacttttgatggcagtcatggattaactgatatgtttcttgtttccagcgtctttttattgcggcttgtctgtatcttggttgtccggcaagcacatcctttctaactgatctaatttttttaggaattcgttcttagtttgttcttctttgagctgacgctctaattccttaatttttcgattagccagttctaactcagttagctcttctggcttcttatgtctgcctcgtttatctgttaatcctgtttcaccattagctagatatttgtgtgtccagctgtaaacctgctggtaagaacaatcaaatttgacagctgtttgagtgtaattcttgtcgtgattaagacagtattgaacaatctgaattctttcttgctgggtagtttttcttcttgctttagtcatatagacctccggatggggatcatagtcccgattttctatatgactattatacttggaaacccattctgatactgttccattgcttctaatgccatatttattagctaaagaaggtaacgacattttgccagctaaatattcttgaacaaccttttctttaaatgccttagagtaatgattattgtattgagcattacttagaagggtatcacgattgctttgatattgatgaacccatcttcttacttgcatcgctccacttttacttggcatcttaagccgtttagctatttcaacgctgctcctattaccattcaagtattgttcaactgcccatatcttttgatcgaatgaatatttactttttctggacataaaaaatcccacctccatggataattgaatactttatgtatttaaatcgtccactttagtgggattgtatcaaaatgtaggatcttttttctattgattttatttccgttctcttctagaaatccaagccataatcaatggcaacaatacaaagccaaagaccatcatcgcaatggcataccagttaacaccgataacttgccctgctgcgtttactacaccaaattgtgccttccagttatattcaactaacaagaagatcacaatcacaccagataaaattggcacaataacatcagtcataacgctcttattagcctttaagatatcttcttttgccttaccacggtaaaattgaataactgctagaggtaccacgatgaaacctaagaatctaaccatcgcgctcaaagtaatcaagttgaccatattgtattcaaaggccatcggaatcaaaattgccaagccaacagagataaagaaagttctaattgggaagttattcttagttctcttagttaaagcttgtgacatctgaccctcacgagccatagcttccagaatacgtggagcattaaagctggaagctacgttgatcccaaacattgaaaccaaggcaccaaccaagattacatcacgtaagatttcattattaaaaatagccgcaatcgctacaacttgcttagttgtcattaaagcacgtggattaagtaccatcgctaccgctacaacgccgatatagacaaccgcaataattaagattgccaatggaattgctcgtggcaagttcttttcagggttcttcatatcttctgaaccagaagctactgattcaaagccggtaaaggcatagaaggctgaaacaattgacatgacaaaggtagttgtagttaaagttggcacaattttctgaccattctgagtcaattgatctacttgccctaggttgcttgatgcaccagtagtaattaacaaaactactccagcaataataattaataccaatgcagccaacttaccgatagtagctaaattcattacatacttaactactttttgaccaaacaagttgatcacggtaataattgccatcaagatcaaaaagccaattgtgacatttattgccttattgggatttccgccaaaaattgaaatagttgacttaattaccccaacagccattacgccccaagctacactggctgagaagtaacgcagaactcccatataaaagccaatttttttaccaaaagcggccttggaataagcataggcagcaccagatttagtgacatactttgaagctgccgcaaacgaaatggccagaatcgctgcaaaaattgccgcaattaaatatacaactaaagctttactaccggcttgctgtaccacactaccaggtgttaaaaaaatacctgaaccaataatggcattaatcgctaacagcacaattgaccaaaagcctaatttatctcctgttttttcagtcatctatttgcttccttactttgcattatcaacaacaaacttaaataagttattcataaacgctacatcggaattacggtgcaacatttcagggtgccactgcacggcaatgacattaccttgtttattttctagcccttcaaccacaccatcaggagctgttgccactgcttttaaatctggtgcaacgtctttaattaattgatggtggaaagaattaacgcgaaattcagttttgcccaaaatttcagccaatttactatcagcttccacttccatactatgagtaggcaaagttggcgtatgaccttgcatgtgtttcaaagtaagttcttttctgtatgaaagatcttggtaaagcgtaccgccatgagccacattaataatttgagcaccacgacaaatgccaagtaccggaataccattttcttctgctaactttaacaagcgcatatcaaaatgatcgcgttcaggccaagtagcaccaatcttttgcattggctcctcaccataaaaacgtggatcaacatcatgcccaccagataagatcaagccttgaacatgattaagctgttcacgaatcacctcatcattttcagtaaatggaataatgtaaggcacaccgccattttgaactactgaatctacatagtcttcgttcacataactacgatggtatcctgggaaaattcctctatcgtcaataattacagaacctgagataccgataattggttttgtcatttatgctcctccttctgcttactttttgtatgtaatattatagagaaatttatgcaaaaagtacaattaaaaaattgcattgttgtctataatttttgcatatctttaaatatagtaaaaaacagcaagccttatttttagctcactgttttatgctatttataccaaattccaaaaaggatttccattacatgctaaatatgtttctagccactgtttaaaagagaaatcaaaatattgttcctctattccaggatacgttagataggactgtttttgattgtagcgatctaaattaatgcccatttctccctcgtctcttaaccaaagtataggtagataattaggtgttttaactaactgatttaagacatactcaatagtgtaaattctacaccttgctccacctaattcgatgccttgaaaagaatcaatgaataattctgcaccgttagcctgtatccaaaactctatcaaatcatttgggacagatatgcctgacaacctatttattttattttcagctactggcggatttaatttaaatttacagtaatagacgccaccaaaaccaaatattggtacgtcgacactgcattttttactaatcaaatttatattatctattatattatccattttaataattaataaaccatttagttataagcttatgtgcttcaattggtactggcattaagttgtcaaagtcattatttccaccataaattctaggtcttatatgatgaacttgattttcagcccaatactcttttgattgattgccataacgctcactaaactcttttatatagtaatatctatccatcgtagtccatactggtgaagaaggaagtctagaccaagtagtattgattggtgtttctgcatcttttttagagacaggatcaacatattcaggaaaattttgaccaattttattttgtaaataaatagaactaagtgaaattggataagtagcgctatttccattatagcctaccattccccatgctcctccaacagcaaaaaatgttgtagcagctggaaatacagcagaccctaacaaaccagtagtaatattgccttcttttacaattggactagctgtatttgtagtaattgggccggacaatgatggttcactatagaattgcaattgaactgaaattgcagcaggagctggaccagttattgaatcaatataaaaattgattttaaattgtccatctacatactcttgtgaagtatgaaatttaacaactgtatctggaatctctgccaaaaaagtatatgcagagtaatggctacttgttgcattaaaattattatgaatttttacagttccattttttaaaatagggacatctttttttacattttcattctttaacttatcttgagctaaagaatgaaaattttgttcattagctattttagcaacattcttatttacatcatttagcgagtcagcctttgcatttgtattgatagctataaagcacacgatagtggctaaaaaagcaaataactttctgtatttcatgtttctttcctcattatctataatttttaacacaattataaggatctttctattattctaccatacaactctatcacataagcaagtgctcccacactgtagcatcagatgctactgggatttacactctagattgatgtatacgaagaacacaattacaatcagaataacatgaaatactactatagcgacaatttaaaatatacagtaaaatctttaaactgtatttcttattctaacccttgttcaaagcgatactgccgtaatacatattccttgaaaaacggtaaagtaaaggccacttcaccataattagtagatttgataacttgatcatctaacaagcgtctacgatagttagcaacaaaattgcttggacggtttaacctttcatgaatttctttaattgaaacacaatgttttgggctctgagccatagctaaaacaaattttcggtcttgctttgacaaactactaagtactttggtataaacattttgctttagcaccaataagtactctgatttaatacattctaaagtgttttgatctattaccttactttttttagcagctttcaaaactaaataacctagcaactgaaaggcatatgaatagcccattgtcatcaacgccattttttcaagaatttttttcgacacttgataacctgattctttaaaaactttactatagctagcttcaacctgtgagagattcaatgctgataaagctattcgctttccacgtagtaagaatgaagttatattttcgtttttcaattcagagatattttcagaaagaccagctatcattaaggctataggataaccctgccgatttaataattgataacatcttgcaaaatctttcaactcctgacatagttttacttcgtctaaggtaatcaacactttaacgtcattttttcttacttcatcaaacatgttcgttaaaatatcttgatatgttaacttactaacgtctgtagaaagcgataatccaaaattagagaaatttagtccttcaatagatttaaatgatttttttagttttgaatctgcattcagatataagctattaataaaagaaggcaacaacttcatccccatggccaaattaacaacaatccaatctggatatgcactaatctttctgtccattgctgtcaaaaagacagttttgcctattccacgcattccataaacaatcgaaattgtatatgaactatttaaattctctattccttgagacacatcagcaattagtttttttcgctgcaaatacactgctggaattcggccaaagctaggattaaacggattatccatattttgtccccaatcattttcttatcaaaaaagcagcaggcttcttacctactactcaattttatttatctttttgatgcttaaccacataaatcagtgccgcaataatcaacactgctgcaccaaccgctactgaaatttgcgtctccggattaatgaacatgaagacaacaattactaccagcataatcaaagcaaagtaatttgaatatggataaagcggcaatttaaacgggtgattctccatcaagtgtggattctttcgtctaaagcgtaactctgctagcaggatcacaaaccaagctaccatccctggcaaaacagatgaactatagacaataacaaaaacattagccaatgatttattcaaaaattgggctaacacattaagcataaaaccaacgaaaattccactggtaattccaatgatcgcatgactaggcacgattctcttagatacgtgaccaaaagtcttaggtgcttcaccttcgtgtgccaatttatacaacattcgacttgatgaataaattcctgagtttgcaccggacaaagctgcagtcaaaactacaaagttaattactgaagctgccgcggtaattcccaccttggcaaaggtcgttacaaacggtgagccaatgctatctaatttattccatggataaattgtgacaatcacaaaaattgccccaacataaaagatcaaaatccgccacaatactgacttcacgcttttaacaatggccttatgcggatcagatacttcaccggctgaaatcccaattagctcaattccttcataagaaccaacaataatggccattgagaaaaagaagcccttgagaccaccagtgaagaagccgccatgactccacaggttagaaaagcctactggatgaccgccattaccaaagccaaatagaattaccgcaaagccaagtaaaatcattaagataatcgttacaaccttgatcatggcaaaccagaattccaaggttgcataagctttcgcactagctaagttagccaccagcaaaaataaaataataattacgccggcaacccaatcagaggtgcctttccaccaaaagcgcaaatactctgttgttgccaccacctcagaaattccgacaacaatgtattgaaacacgtttgcccattcggctaaatagccggcaattggatgcacatgctctgaagcatagtctgcaaaagaaccagtacctggatcaacataaagcatctcacctaatgcccgcattacgatatacaaaataaccccaacaaaaatataagctagcagtactgaaggaccggtccacttaatggttgagctagcccccatgaatagtccaacaccaattgctcctccaagtgagatcatttccatctgtccggctgtcatcgaccgctttaattcaggtgctttcttcgccatttccaactccctttctttagcatctgtaaaaatttcctaggaaatatatctattctcatttatctttaatcactataccttatcattttttcgaacaaaactgtagctgatcgctaaaaagattgcaaataaaatcgaaataatcaaagccagctgcgttgatttgataaagaataataagattaaaataccaatgtaaaaggcaagcgtaagccagctagttactgggtagcccggcattttaaagctgcctaaattctgcttattctgtttgcgataaacaatatgtgctgccataatcatgatccaaacaatcacaaaacaaatcgttgaaacagttgagacaacggagaatatttctgctggcattaaatagtttaaggcaactactacaaataaaattaatgaagaggtcatcaaagcgttcattggaattgcttttttggtcaattcacctagtcttttaggtgcatggccgttacgtgctaatgaataaagtgatcgactagttgaaaagattgcactattagtcgctgacatagctgcagtcaaaacgacaaaatttaaaatccctgcagccgctgtaacaccgatgccggtaaagacctggacaaagggacttgaagtagttgtaatgtgattccatggataaacagacataattgccaacattgagcccacataaaaaaggccgattctaactggcaaagtgttaattgccttaggaatatccttttgcggattagctgtttcactagcagtttgacctacaatttctaccccaacaaaggcaaaaacaaccatttgaaatgataaaagaaagccccaaatcccagttgggaaaaagccaccatgattaactaaattagttagtgaaacataaccgccctttacatgcgtatgaagtaacaacattacagcaccggtaatgattaagactacaattgccattaccttaatcattgagaaccaactttccagttcaccaaataatccgacatttaccatgttaatcaacatcaataagatcacaattactaaagggccaacccattgcggtagccacggaaaccagtatcttaaataaattcctgtcgcagtcaaatcagccatagctaaactaagccagcaagcccagtacatccagcccgctacaaattcggcacgcttacctaaatattttttgattgactctaaaaatgaatgactatcaggatcggctaaaataagctctcctaaagcacgcatcataaaaaaggtgataatccctacgattaagtacgacaaaataattgaagggccagcactatgaatggctgaaccagaacctaagaataggccagtaccaatggctccccctattgcaatcattgttacgtgacgactcttaagcccgcgttttaatctcggcttctcatccataattactcacaccttcctcaaaataaaaaatggagcggcatgttttttaaatgaaacatgttgctccatcaagtttgctttttttgaattatatagtcttataccaattcatgcaattattttttatctaaaaaagatattcccttaggaatatcttcattattagtaaactttaaattggttcaacggccagtaacgtactttaactacgccaacgatactactacgcttaatggttccgatataacggctatccttagaaacgctccggtgatcacccattacgaaatatgttcctttcggaatgcgcccagtatcctgcacatatttaatctgcgctctagtaaagtattgctggtaagtccgcgcccgcatcagtgactgcatagtaaaattctgagtctcagaataaaatgtatctgagccattatcaattaacttcgttccttgtttcaaccaaggttgagcaatctttttattattaatgtagatttgattatttttgctgacgattttttcaccaggcaaaccaataacacgcttaatgtacaaagcacctggttcatctggtgctttaacaatcactacttcaccacgcttgatttgcgcatgacgctcagcgattagccgatcaccattttgaaaagtaggttgcatcgaaagacctgatactgtatcgttgctcaagacgaagtggaaaagcagcagataggcaccgatcaaaataacccagataattaagatatctaggaaaaacttaccccatgattctttttcttcttttttctcagccattatttttctccatttatctttttccacagtttacaactttatggagaaattgccaaattacaaaaaagaggtatttcctcggaaatacctcttttattattaatgactattaattagtcttcttttttgtcttcagttttgagactgtaaaatagtttgtgtaaggatgaatgattccttaaatttatttctttaaacattagaaaaaggagttcctttcttgtatgattggtttgaacaaaaaaacacatacagaaagaagaactccttcatgaatgattttaccaaagattttgctcaagctctattcaatccagacaaaataaatgatttattgcgcaaagagctacaacaggctgttaataacttgctagaagctgagttgactgcctttctaggctatgatccctatgccagaaatggctggaatactggcaattctagaaatggtgcttatttccgcaaggttgatacccagtttggaccaattgaagtgcaagtgcctcgagaccgcaacggtcagtttcatcagcacacgctgcctgactacaagcagcactctgatgttttggaaagcacgattatcaagctctactccaaaggcgtaactaccagagaaatcgctgacttgattgagaaaatgtatggcagtcattatagtccagctcaagtatcaaatatttccaagcagatgctccccaaggttgaggcttatcacaagcgcaagctaagcgacaagtttttctgtgtctatttggatgcgacataccttcctttgcgccgagaaacgtttgagcgtgaagcagtatatattgccattggcattaaacctaatggacataaggaagtcattgactactgcattgctcctagtgagaacattgaagtctggacagagatgcttcaaaacatgaagtccagaggcttgaagcaagttgaactctttctttctgatggtgttgttggcatgaaaacagccttggccaggacttatcctaaagctcattttcaacgctgcctggttcatgtcatgcgcaatatctgtgctaaagtccgggtggatgaccgcgaaaagatcatgaacgaattcaagcagatacatcaacagacaagcaaaaaagaagctgcagctgtcttgcacaaattctatgccagatggaataaagcttatagcaatgtcatcaaaggtttgaaggaaattgagcccgatctgctggtcttctacaattatcccaaacaaatcagagcttcaatttattcaaccaatatgattgaatcctttaacaacgtcatcaagcgtaaagctaagcctaaggcagaatttccaactgaacagtcgcttgatgcatttattggcatccaggcaatgagctacaatgaccgctatttcaaccgaattcataaaggctttggtcaggttcaggataccttagaatcttattttgaataaataattaaaaaatcaatttgcgagaaagaactatttacacaaaagatttgacagtttctcagttttagcttcgtctgaaacttctaccgttacacccttcttagcaagaacatgagacatcttcttcaagtaaatgttaatgatcttgcccatgtcttgttcagtaagtgagttgaatggaacgattgcgtccaaacggttcaagaattcaggtctgaagtagttttcaagggctgagattaacttgtcttggtcaaccttgccatcttcaagcaacttgtctgagaagccggcgtttgaagtcataatcaagatagtatccttgaatgaaacagttctaccttgtgcgtcagtcaaacgaccgtcatccataatttgcaataatgcgttgaagacttgtgggttagccttttcaatttcatcaaataaaattaatgagtatggttggtgacgaaccttttcagttaattgaccaccttcaccgtagccaacatagccaggtgctgaaccgatcaacttgttaactgccatttcgtcttggtattcactcatgtccaaacggattaagtgttccttgttaccaaataattgaattgccaattgtttagcaagttcagtcttaccaacaccagtaggtccagtgagtaagaatgaaccagtaggtctgtcgctgtctttgaaaatttgcttacgagcaatagcgtcagtaattacatcgatagctctgtcttgatcaataacattcttcttaagtttcttagctaagtccaagttcttttgagcttcatcagcgtgaagttcactcattgggatcttagtcttttgttcaataattgcgtagatgtctttttcagttacttctggagtattcttagaatctacattcttaagttgtttctcaagttcagcaatcttactcttaatttctgaagccttgtcgtaatcctctgccttagcagcttcagtcttcttagcttcaagagctgagatttggttctttaagctcttttcatcagttgattgtacaagcaatgccttcttagcaccagcttcatccatcaagtcgatagccttgtctggtaagcaacggccttgaatgtatctttctgataattcaacagctaatttaagactgtcgtcactgtattttacgtggtggtagtcttcgtacttcttctttaagccttccaaaatcttaacagctacatcagtagatggttctggaacttgaacagcttggaatctacgtgataaagctggatctttttcaattctttggaattcactagtagtagtagcaccaattaacttcaattgaccacttgccaaagctggcttcaagatgttagctgcatccccattgttgttttctgaatcagtagaaccagcaccaacgatgttgtgaatttcatcgatgaataaaacaatgttaggatcgctcttggccttgtcgataaccttctttaatctttcttcaaagctaccacgaagacttgaaccagcaaccatgtcattaatatttactgaaatgatatgcatgttagccattttagctggtacattacctgaagcaattctttcagctaaaccttctacaatagaagtcttaccaacaccagcaggtccgattaaaacaggattattcttcttacgtcttgaaagaatttcaattacgttatcaatctgttcgtcacgaccaattactgggtcaaatttattgttcttagcttcctcaactaagtcaacaccaattggcttttcattgggttgttgtgggttctgttgaattgtttgtggtgcagcacccatgctgctggagtaattaattggaattgaacctgaactgcctttgctatttcttctgctaccaaagtcgtcattaaagaatgagctattcaattcgttaaataagttatcaaaatcattgtcaaagtatgccatatgtgcaacactccctatctcaaatttacgtctttagcactctagcttatcgagtgctaactcattacatttaatagtatagcaggttatccacagactgcaagctaaaaaacaaaagttttacacattttcctttatttttgtgatttttatttaaaaaagcactacaaatgctgcaatataaacatttgtagtgcttcacaaattataaagaatttcttaagatgggcaaaaattgatgattattttgcttaaaactgttgaattttaaggaagttttccacagataagaataagtttattaccataaactatttctgcctacctctattattgcccttttgcttgtccagtattttgcggttcgctcaactttctcggcccaagaaaatactgtttaattactttgattacctgcttattctgaggtaaatccgagtgatccgcttctacacccgttactgtcattgcagtatagctcttgacttgattctgaaaaatatattttccggctgctacgctagcttctggtacaattccatcagactcataattttttccaccagataaggaataaacaatcaagtttttcggtagtttatctttgttcttgataaagttttctagcatttgcgttttatgattaatatttttttcaccaaaattatatggcgttcctagcgtcatcagacgtttgattttaatttcatcagaatagtaacagtagtaatgttctaaccaataggtccagatcaagccaccgttagaatgcccaaaggctttaaaattattaaacttatagctctctgataaggcataaaaggcttgatcaaaccagctggcttgcttcttaatattgctataaccatcgtgattattttcaaaaccgacaataatgaaaggttcgttgtcgtttttattaattttgcctgaatatgacagcgttccattcgttgaaactttaattttaagcacgctatgcttagtcggtgtgttctgatttagctgcttcactaattggttaaaacgttcagtcgttgcactagaacctggaatcataattactggtgacaaaagcgatttgcgtctttcagctctagcgtggttatcagccttcatccaagaataacccggaatagccaaagctactaataagactaagacgattgccaaccatttaaaattaggattttgaactaaattaatcatttttttcttcataatcctttagtcccctttcaagtcgcaaacctaatttcatagttggaataaacattattatatccaaaatgaataacaaaatagaaaataccaagttgctccaatcaccattggaaccaaagaaagagaccaaaattcctggtgtcccacttaaaacggggtaagcacaaggttgaattaaatggcaaaaaattgctccagcggctagtagaatattaataattggaataatcacaatcgccggcagtaacaatggatttaaaataatcggcatcccgaccatcatgcctccagttgagcccaaagctgctggaagcaggttaaccttggcaatattttcactatccttatttttactataaattaggataattacaatcatcgctaaaacaatactcgcaccacccatttctgcataaggataaaacaaagaactacccaaatacttatatggtacattccaagcactcccatgttttaaggcaaaatttaagttagctgctgctgaaatactattagaagtagttgacaaagaagctagaggataacctattcccatccagctaagtaaaaagactgggatagtcagtaaagctattaacaaaatattatttgattcctgtatttgagtaactaggcctttaaaagtactagaattcaagaatttgatttgaaattcataaattataatccccagaactatcccacaaaaaattgcaaatattgtcgggataaacgcattccaggctctttccttaattctagcggcatgttcaaaatcgactggcttgtgttcctttcctagccaatgaaaaatttgccctacaccatagccaattaacaaggccagcaagacagcattaatttttaaaacactggaagaaaatggtgaatgatcgctggcattattagctaaattattggcataagcacaaaacatgataacgatgacagccgtcatcccggccatggttgaatctttacggtataaacgcgcagtataacgtgccgcaaaataagccgcataaataccaaataagccgaaggttacccgaaccatcccccgactgacaaatgctcccgcataccaaaaacgatctggcaaagtgatatcaaaattaaaaatattgtaaataaaactatcgggcgaaaaaacggcatctctgaacaacttaaaatatgccccaattaccgcgatcggcatcagcataaccaacgttcgctgaaaaattctaaagattgccaatcttcttagtttaagaaagatatttgtgattctgtttaccatggtattttcctttacctatctattctaaatatgattgaataaagttaattaaaacaattattaattatacatctatactagaaagctgattatgatggcttacattaacttaaaaaataatactaaaatttaccaatctggtgacacaaccatctatgccaataagaacattactttttctatcgataaaggagaactagtcattattctcggctcatcaggagctgggaaatctactttgcttaatattttaggcggaatggaaccaaatacaagtggcgatgtaattgtagcgggaaaaaatattgcaaaatataacgctaaagaattaactacctatcggcgcaacgacgttggctttgtttttcaattttataatttgattcccaacttaacagcaaaagaaaacgttgaattagctgctcaaattgtccctgatgcgatgagcgccgatgatgccttgcagtatgttgacctagggcagcgagaaaacaattttcccgctcaactatcaggcggtgagcagcaacgtgtggcaattgcccgagccatcgctaaaaagccagccttacttttgtgcgatgagcccaccggtgcccttgactataaaacaggcaaacgaatcttaaaaattttgcaaaatatgagccggcaaaatggctcgacggtcttgattgtaactcataacgccgctattgccccaattgctgataaggtcatccgtattcacgatggaagtattcaaaaagtccagcataatctacatcccgctgatattagtacaattgaatggtaggtgggcgacatgcaaaaaactattctatggaaagatgcttggcaagcaatcacccattcacttgaccgttacattgccattattctattaattgcactggggacttttgcctttacaggtttaaaaatggctggtcctgatatgcgagcaacaggggcagaattttttgccaaacataacttagctgacgtcactgtcacttcaaactatggcattaattcaactgatcgccttactattcagaatttaccggaagtaaaagaagctacttttggctattttcaagatgttaaaattaaaaatcaacctgatacgctccgcatcttttctcaatcagataatctttcaagttatgaattgattaaaggtcattttcctaagaataaaacagagattgcactgtcatatttattgcagaaaaaatatcgcttggggcaaaacattacttttaataaacctggcattttaaaaaataagacttacaagattgttggcttcgtcaaagctagtgagttcttagataaaaatccaatcggtcaaaccaacattggcagtggccatttaactggaattgcggttgctaatcataacgccttcgccgcaccagtttatcaaattgcccgaatcattttcaaaaataccgccaatttaagtccctttggcatagcttaccgcaaccgtgtttataacgatcaaaccaaattgcaaactgctttaaaccaaaatcgagccgacaaatatgacaaatatcgggccatgtatcaaaagcaatatcgacaagctgcagctaaacaattacttaaacgtggcatcgtagttaacccggcgcaaatcaaagtaccacagaacaagcttaaaattgcttatcctaactacgtaatcaacagccgtgaagaaagtcagggttatgcttcttatcgagcagattctgaacgagttgaagttttggctaatgtctttcctgttttcttgtttgctgtagcggctttggtcagcttaactacaatgatgcgttttgttgaagaagaacggactaatattggtacgctaaaagcactaggctatggtaatggagcaattgccattaagttcttgctctatagcacctcagctgcaattttaggtgttattctgggggctagcttaggttacacctttttgcctaacttaatcatcaaggcctatttagctagctcaaccttaggaactgattaccagctgaattttgcttggggaccactattaatttcattgacgattgcactacttgcaacaaccgtcgtttcaatgattactttagctcaaactctgcgtgaacagccttcagctttacttttacctaaaccacctaaaaatggttcacgtattttactagaatatattccatttttatggaagcacatgagcttttcagctaaggtaacagcccgcaatattttccgttataagagcagaatgctgatgaccatcctaggcgttgctggttgtactggattactagtaatgggatttggtattcgtgattcactacacggaattggcaatattcaatattctgaagtacaaaaaaatgatgtcatcgctttgaaaaaccgccatgttaacacgactgagcgacaaaaattaaacaaaatttttaccagccatgatgttacgcaaactactgctgtacaatatcaacaattgactaaacaccttgatagcactggagcaactgaaaatgtaatgctaattgcgccacaatcaactaaaaactttagcaaatctatcaatttgcaagaacgtcaaagcaagaaaaaacttgttttgtcaaataatggtgtagtcatttcagaaaaattagctactatcttgcacgctcataaaggttcaacaatttccttaaaaaatgaacatgggaaactacttaagttcaaagttagtggaatctgcgaaatgtatctcggtcactatatctttatgagcccagctgaatatgccaaagaaactggcaaaaaatttactactaatgcctatttagtaaccatggccaaacattccccaggaaatatcagccatattagtcaaaaaatgatcaaaacaggcgcaatcgaaacggttgtctcaacttcatcaaatagaaaattgctgagcagtttcactggtagtctaaatgaagtcattctaatcctaattttaatttcagggatgttggccttagtagtcatctataacttaactaatatcaatgtcgctgaaagaattcgcgaattatcgaccatcaaagtgctaggattttacgataatgaaacaacgatgtacatttatcgcgaaacaatcatcttatcggcactaggaattatcgtaggctttggctttggttggtggctacaccactttattatcactagtttgccaccagatgtcgcgatgttcgatccgaatatgtacccgttgaacttcgtcttctctgcgctaattcccgctattatcaccgctattttagcaattgttgtccatcacaagatcaagcgaatcaacatactagatgccttgtcctccattgattaagcgctgttatgctataataatcactatagaaaagggtggaaaaaacatgccaagaaagcactttgaattaaacagtgatgttaataaattaatcgaaaaatatgatgaaattaataatgttgatttcaataagttagttaacaaggccttaagattctaccttgttaatcaaatgaactacaaagatgttcaagacgccctgaataaagctgataacgaagcttctaagtatattgatgaagcaatgcgttccagcatgggtgatattaatcgaaattattagaacataactaatcatggaaaaagccatctgttttgacagcaggtggcttttagtattcattacaagataatttattataaaaacaactaattgataatttctttactcaaaatgcttataccgataatatcgataacctatctttttaccaaaaatcgtctccgaagttttcatccaattagccagcaaaacataaatgcctaaaaagactaaaccgaagattgctaaataaccaaaactaccaacacggcctaagtcgttgaaacgatagccaaataaaatttggtaaacaaagagcaggataatgtaaatctcgtttgaaacaatgatcggcaacaaactccccatcttaacgccatatgtcttattaagcttgtgataactgagccaaattaccagtaagaatgaaatatcagttgaaagaattgcaccatccccattcatgaacatagtcatcggtacttgcaaaattatttttactaagacaccttcaaccatatagatcacagccagtttgttcatgttcaaagctaaaagcagtgttaatgaattcatcaccaaaccagcaaacaaactttgaacaatattttcaaccaaataatacgcacctaaactatcgtgtgagaacaagaccgtataaattggagaagccgcaaaagcaccaagtgcaacaaccggaagcaagacaaataatagtagtctatagttctctaaaagcagctttctaatgctttcttgactatcattagccttatacttaagccctgctaaaagcggcagactagtctcagaaacggctgtcgcaagtgaaataatcaccgtggtaatcttgcttggattagccgagaaaattgtgtacaagtaactaacatagcttttactcatatgactgaagctaatcaggatttgtttaaacaaaagttgatcaactaattgcgtaacagtaatgaacgatcccagcaaaacaaacggaattgaggcataccataagttaagcaaactacgagaaacattattaagtgctctgggctcgctattttcaattaattctcggtaatgtccccactgcttgcgcatatatgcaaaaagatacaggtaactagctatagcaccaacacaggcgccaaacacactgaaataaaccgccgttacgtaatcatgatggaagacttcaataatcaacaaagtagccagcaaaataaacaaaattcgagcaaattgttcccataattgggaaatcccatatggcttcatatcattatttccctgaaaccaacctcgaaccatactcattgatggcagaattactacggctggcactaatactcgaatagaaattgttgcactagccactgaatccactggactatttttggcaatcattggtgccgtcacataaagcaaaataccacacgctattcccatgaccagcataatagcgaagcctaatttggtaatgtacaaactgtctttatatctattttgcgaatttaattgcgatacttcccgggcaataactgaaggaagtcctgccgtcccaattgataaaaacagcgcatacggcgtatatgacgaattgaacagcgcctgtgcgtttaattggttgtggtagcttcccagcataattagccaaggaatcaaataaacaaccccgagaattctagatacaatgctaccaaacgatagccaaaatgaaccggataggatttttttattcaatagaatagcctcaaatctacgttagtttctcattgtgccttcttattatacgtggattttataactttgtgggaaatatgtaccaactagttacccttttttaacaaatttttcggctctaataatacaaatcagttacattatttactatattgttacccagcctttaattttacgttagaccccttgacctaaccttctttaattattatccttaaaatgtttctgttaaaggtcataattagacaaaaataataatgtattaagaatattcatcgggggaattaagttgtcattcaagaaaaagattatcactaaattagcttatgttgctatgctttcaactactggcgttgccgcagctgcaatcgtgcaaccacaagcacatgttcaagcttctaccacttcagttgctgctcgctcactcggaatcgatgttgctagttaccaaagtgctgatctttcagctcacgctaaaagcggtgctaagtttgctgttgttaaagtaagtgaaggtaccagctacagaaatcctaaggctagtgctcaaatcgctagtgcccgcgctaagaatatgatgccaatgggctaccactttgctacattttctgctaatagcgctgctgctaaaaatgaagccaactacgcaatcgcatcagctaaggctgttggtcttggtgctggctcataccttgcatgtgactatgagtcaggtgacggcaacaatatctatggtggtaagaatcctactgctaatgcaattaatgccttcatgagcaaggttaaagctgctggttacaagccacttctttacgctagttcatcagttttaagaaacaacattaacactaactctgttgttaacaaattccctaactcattatgggttgctgcatacgctgtttcaggtcgagtagacaatcctaactttgactacttcccatcaatgaagggtgtttcaatttggcaatttactgacaactggcgtggtcttaacgttgacggtaacattaacgttttacctcttacttcatcaggtagcgctgtttctcaagcacctaagaaggctcgcgtattaaagaagaaggctcatgtatataacaaggctggtcaccgtacaggcaagactattaagaagggcacttctatcactacccatggcaagaagaaaactatcaatggtaagaaatactacaagattgccaagaatcaatacattagatcagctaacctttactaaaaaggcaaaataagtcatcaaaaaatgcaccaggtagaaattacctgatgcattttattttatccaattttttacttggcgaattgttcaccagctaagttacggtagaagttagccttagcttgacggtaatatgggttaacccacaataaaccgatcccgcaggaaataataccaagtagccaccagccgatgaaacttaaatcaaaaataaacaagtccatcttatggccatccatcaacttacggctggcactgatagcttctgtggcagtcggctcatgaccactatctagcatgtcacgcaagatatatggtgtcactgcatatgaataagccttgatcagccctggaataatcagtaaccaagtccacaaaataagaaaaatttcatataaaatataagttaaaaagttactcttaaagtttctggtaaatggactaaagatacctgaaagaacattttccttagtaccactatctctaaaatgcaagatagtataaattacgccccatgtgattaagccaattgcaactgaaactaccaaagtaatcagccatgcaaaaggattaactcttactttatctaggtacatcaattcagcattgttaccgaagcggcggacaataccgtacacgatatcttcgcccttttcaaaaaagttttcgatatcggtcaaaatataaacgattagccagccaacaaatgacagcaaaactgcccagccccagttaccacgtaactggtctctagcttgttcttttaattcttttcttgtagtagccattttctctcctcctcacttttctaatcatgagtattgtcgcctaaaatcagggcagaatcaattaaaagcacatcaaaaaagcctaattccaccaacatcggaactaggctcacacagtgttgaccgccactctgaccacatatagaagataacattttcgctaccggagaaaatgactactaatagcgacggtacatgatagattttagcattcaactacctaaaagacaagcgaaaagacgtgttgaattagcggaatggataccaaaatttacggataaaaaagacgaggtctaaacctcgtcttcttcattactaaaattcaagcatcatcgtcattgcacgattgatcttctttttaatctttttaaactcaccagaagcagtatgattatcctgcaaaatgatcatgttctggccatctttagttgcccgcataaaggtataatacccttcaccagcaccattagcagctttataatgctttaaattataaagtccaccattataatagctaggagcctgacccttgaacagaacttttctactcttgttagtcaaaatcttaccagcaagaatatactgcatggtcttagctaaatctgcgttagacattacgattgaaccagcacccagctcattgtgagcatccttaacggctttagcatggttcactttgacatattcaccctcacgcatttcatagcctggtacccaatgactagccaataacttagccttgtctgaccacaagaactcactatgggttagcttcagtggcttgatatatgtgtcatggaacaattgctcgtatgactttttctcaagcttggacaagattccacaaaggaaaatatagtttactgaagtatagtgccacttacctaatttgctagcatcaaacacagtatattgtgcatcatgcttgatgttcgcttcatcagagataaactcaggcgtacctaattgttgaccagctttcaaatccagccctgatgtcatatcaattaagttgctaatcttgactgaactagcaccatctacatttgggtagaattttgaaagtttatcgctaagcttcaactttcctttctctacctcatgcatcaccattgcagctgtcattgacttttgaactgaattgatcaaatagctagtgtcaggtttattgtccgtcgcataattaagcaaaactttgccatgatttattactaaaactgagcctttaacgcccacatggtcaatagcctggcgcactattccgcttttaaacggtctttattgcttaaatcaactcgtttaacgttatccttgttttgccacttcttggagtagaagtagttagacatatcatagtcataacgcttattaggttccttcatgaatggacgaacagcttgatcaactgcaacccagcctttccagcctaggtgaatagtatcttgcataaagtacttttcattgcctcgtcttgaaagatctgcaatattttcaaagccttgactggttaactggtgttccatcttagcaacagactcttggtacatcttgctagataaaccagtgtacttcatccacttgccattaattggtgggatgataaatagcacattagtgtgttgcttagcaaactgctccaacatcaattggagatcaccatattctactgaatgtacatagtcaaaatcacgctgactacccttcaagcgtttcaataccttctttggtaaacgtgttctaaagaaggtattatcaatacctaagttgtttgagttagtgtgtatagcagcttgctctgctgcaaccttattcaaagcagctacagaatacttgttaggtaaaaccttagctctcttttgaatcttatttacacgatcacgcaattggaatgagctgaagaaattatcttcgttacgcaacattcgacgacgattttgtaaataaaatttttggaagctagtcaacttcttgccttgagcaatttgcttaaggctattcttgatctcgccctttacatttggcatttccaacagacgtttagctgcataacgatcagttttattattcttggcactaagcaagaaattacatgcttgcaatggtgaataatacaatgcaaaggcattaggatcttgaccccgcttagtaaaccattgtggtgaaatgatcacaacagccttcttgtttctaagctgcttagctgttccttgcatccccaagaactgagccaaagattgactacccggtccacctaataagaatggacggtagtttctatgatacttttccgcaattacactagggtgaagtgggtcgaatcttgacaactcacttgaaccatagaatggcacgtagccatcttcaaaagcttcctgcttcattgtgctgcccttgaagacagttgtgttttgtgaagctgcagcctcgtaaatcgtttgcttagaaaaagttctttcccaaggaataaggaaaacaactaacaaaaggataaaagcgcaaagaactgggccaaagatttgccacagccggcgtttattactcattttctaagctttccacctttgccacaatcttgtttggagtgtcccattcttcacggttaaattctgaaacaggaacatcaatatcaaacttttcttgcaagttcaaaagcatttgtacacttgccattgagtccatcaaaccattgtcaaagatgttttcatccatttggtctgataaatcttcaccagttaagtcatttaaaatatctaatacgccttgttttgtatccataattaatacctctcaaaaaacaactcaatacttattctacttccagccgaaccacagttgacttaggaaccctgagaaaatcaagaaactgaaacatactacattgaaggttaagaaaatggcgaaccatttagtaaacttgttagatggaatttgcttcttatgctttctcttgaatctaagccacatatcgttgatacaaatagctgaagcatggaagataccataaacaatataataccacgttaagccatgccagaaacccatgattaagaacaacaggaagtaagaaacttgtgataatctaattcgattcttaaacattttcttcttcattgcaaagaaagtgaatcgcatgtagatgtaatcacggaaccagaatgataaagtaatgtgccaacggttccaaaaatccttaatgttcttagaaataaatggcttgttaaagttcattggtgtatgaattcccataaagtatgagattgatacagcaaacaatgagtaacctgcaaagtcaaagaacaggtacatactgtggcaatacatgtaagctacaagccaccatgatagcttcaagccgccatttgcattaccaacggctaaagcagcagcactgatctttggtaacaaataagtgccaaagaaccaaccaatcacaaatttgtataaaaagccttggaataagtatctaacagcatactgcatatctgtaatgtatgcatcacgcgtaggtaccttatcataatcttttttaaatctgcggtaacgatcaataggacctgacgaaatagttgggaagaaaagcaagaatcttgcgtaagtaacaggatctactttcttaattgccccatcacgcatttccataataacttgtactgtcttaaaggttacgtatgagattcccaagaaaccaatgacaaagccaattgagttatcaggaaaagcggtcaaatatttaactgcggctaatggaataattgccaaaatcacagccaaactaaagatccaagtcttatttttaccgtggtgacgataatactgataagcaaaggttaaggcaaattcgtaaaccaaccagattaataggttaaccccttgctcccagtgatcaccatcaaaaatcaagaacaagaaaacaattgaaaaaattgcttcatatgtcttgagtcgatgaccgtaatatagcccaatgataattggaattaaagcgatcatcaaatagatgaaatattgcggattagaataaggctgtaagttaatgaaattaaaattcactacttattaacctccttaattaccgccttaatatctaccttaccattttgtgaaataggtaatgcatcttggtagatgtaacgctgtggaatcatgtaaggcattatattcttagctaagtcttcacgaatcatcttagttaaagcagcttcagaatactgacgacgaacgccttcttttaattcgatttcggcaacgatctgcttaacagtgtggtccttattgtacttaggagcagcaacgccataacggacaagcttgttcttagttaagtagaaattgatttcttcaagttcgattctgtaaccattgaacttgatttggaagtcaattcgaccgcgataaaatagcatatcgccatcaaagaaaccagcatccccactccggtagctacgatactcagcaccatcttcatggaaaaaggcagcttcggtcttttcaggattgttcatatatcctttagaaacactaggaccactaatgataatttcaccttcgccaggcttatcacccttagaagtatcaattgtaatcttagtgtcttcttttaccttaccgattggcaaacggtcatactttttaagaacttcatcagtaatttcaacttgagtaacagcaactgttgtttcagttggaccataggtgttgaaaatatgactatctgggaacttcttcttaagcatctcagcttcactgtgtggcaattcttcaccacagaacaagaaatgacttaagtctggatggtgttctgcatcaaaagtcttgtccaagaagcacatctgtgcaaatgacggagttgatacccaaacattgaactgcatctttggcaaagtttggaataatttaccaaagttttgagtaacatcatgaggcaaaactaccaacttaccagcagaaacaagtgctggataaagactcattactgacaaatcaaatgagtaaggtgcttgtgccaagaaacttggatgttctggcaaattaaagtctgacaactcccagttaacgaaactaagcaaattgtcgtgactaatttgtacacccttaggtttaccagttgtacctgaagtaaagataatgtagtagttctcatcaccttcaacgaagttcttctcgtcaacttcaaaattgtcgtcttcaacttcgctagccttaagaaccttaacatcagttaaatcaacttctggtaacggatcaatttccaaaactagtggtgacttagaaacgtcttgaatcatcgttaaacgttctgcgttagaatagctagcaattggaatataagcgtgacctgacttaacacaaccaagaaaactagcaatcatttcaaaagtttgtccgccccaaatcataattggagcatgctctggaatatctaagctagcaattttatgtgcccacgcatttgaacgctttttaaggtcaccatatgtattagtttcaccgagatagtcgtaaacaacacgatctggttcgtttgcggcgatctcatcaattttcttaataacatcttgaatcatgtgatagcacctaccttaaaattcattataaatgaagtgaacagatgttagtccactatattcatataaatagataagagccatcaggattccgaaataaacaattgttttcaaaacaaacataccaatacgtctgcctcgagaatcaaccttcgtctttttattcattttttctcctttaggtaatcttacttttgcctttgccctatattactacaaatagtggcaacaaacgcactaacggcttatattttaacaaatttaaactttttcttaaatcttcagttatttgtttcaaattgcgaatgcgttttctttactgttgtctcttgcaatcccgataagcaaaaaataatggaataaagataactattgccacaaaaatcaaagcaaagatcattaagcgccatacattctgtggtttagtccacattttactctttgccgtcgccaacaaaaatgccgcaaataaagcaataacaattacttcaaccaggcaaaaaattaaatgagtattttgccagagatataagtaggttgttgccggaaataaacaaaaccaccctgaaaagcgtaaaagaaagatttcttttttacgataatctactttcattatagtttcctttcctcattaactgccaaataacgcattaatattcaccgacaaaatccggtccataactacaatttctggtctggcgtagatcttagagcctgattcaaacacacatagtagttgtcccttataagcggtaatttgctctaaatatggcggcatggtaattaccagttctgcattcttttcgtctaaagcatttaaagctgaagttggaaaaacgtagagcttggaatcaccactaccataagattggctcaaaaaaattttattttggtaaattgcaattccttgaatttgcttatccattgaagtttcgccagttggatcggaccattgcagcgttccggtaacagatttaacttcattattagtaattgagccacgatttttaccactacgcgctatagtgtaagccgcaacttttcctcgaccatacatgttaaaaaagccaacaaacaattgaccatcataatatgtaacggtcgatgctttttcaactgcaggaatggcaatttgatatttatacttaattggtatttggctgccctctttataggcccttaattctgccattgaaaatgctgctagcgctgaagatttgcccattgagccagttatccagatatttttggctactggatcataagcaatcccacctaggtgtggccgaccaggtatttgaatcgttttaagatatttgcctgtcttcttatctaagacataaacaaccgaagcatgctcatgttcaccatcataagcagttagcaaaatatacttacctgcaaccgtaatcccctgtggtgtcattgcagttgctgtattgacctttttagttttaaaatcataacttttagtagcaactaatcccggcaaaacaaagtcttttccatcccacgtccgcggtggtacataattggcaactttattaataaaaggatatttttcacgcaatgctttttggtaattggcaaaattatgccaagcaggactagtgcttgtcccatccttagcaattttttcttttggccgttgacggatcatctcctgcttctgccaccattggtaaccgaaatagcctcctgcaccaatccctgcaagcaaaagcagtactagcaggaagcgcaaaattcttttaccaatttttttcaaaaaattactcccttctgtttaggaattgtccctattatgcaattcattataacgaaaaaacaattactttttgtttttaactccttgctataagctttatttactaaaaagataaatttttttgcaaaaaagtgctttcgtcacacttttttcacaaattaaggttatactagtaaatgtagtgaggaagaataatcctctactacaactcaacttttttgtttttcattcatactcctccaagtaaataatgaaaataaaaagaattgacttactccaattagtcaatttcatatctatccctttcggctcacgtgcgttgcgtgagcttttcttataccttaacttattctcaagcaaatctttaccttttcataataaattgaacacttttacttcacatttacccagtattatataaaccgtagcaagatggtagaaacttgctacaatactcccacttttttatttcattcttactcctccaaagtagatgaaactaataaggtccgcaaaaacttgcgggccttttcctttttcagcacttttttctgtataattaaggtagaaatgaggtgccgctatgttttcaccatcaatcaaacatttaatagaagaaaaatctggttcatttttaatccctgctagccgaattgcctttgtccaagcagacaatcctctttatcatgcctttttgattttgactaaggttaaatattcaaaaattccagttttagataaagaaaaacgagtcgttggcctgcttagtttggaaatgattacggacaagatgctgacgactgatgagatctccactgcccctttagataaattaaaggtcgaagatgtaatgcaaactaagtttgataaaataaacttcgttgaaaccaccctagaaacgcaactgcatctgttaatcaataatgctttcttgcccgttgttgatgatcgcggcgtgtttcagggactacttactagacgcgaatggattaaggcatttaactatgtagttcacacttatgacaaacactacgaaacaaaacgaataaaataacctccaagcagcctttaaggctgctttttttaactccaacatttattgagcaaaaatgtgtccagaccaataaagaatgttagaattaagcggtagacagatatgtttgtattttggggagggcaattatgaaaaatttaaaacgtcaatggaagtttattgtcgttttgattgctggtgcagttggattaattagccaatttgcattgcattcaaagagcctattctcaatcgggaatcttcaatttccagttcatgccatcattattgatatcattggtatcttgatggcaatttctttactattggaaattttccacgattggaagacaggccgttacggcgtagacatcctggctgttatcgctgttgtttctaccatattgattggtgatgtatgggctgaatggatgattttggtaatgatgaccggtggtgaaacgctggaagattacgcaactggtcaagccaacaaggaattacgtgccttgcttgataaaacgccacgtatcgccaacaagttagttgacgggaagatcaccgaagttaaggttgatgacctgcaggtcggtgatactgttttgatcaagccaggtcaacaagttcctgtcgatggtcaaatcgttaagggcacttcaagcttcgaccaatcttcattaactggtgaatcagttcctgtgaccaagaaccctggcgacgaattaatgtccggttcagtgaacggtgatgtagcggtagagatgaaggtaactaaggctgctaaggactcagaatatcagtctattgttgcgttagttaagtcttcacaagctcaacctgctaagttcgttaagatggctgaccgttacgccattccgtttaccgttatatctttaattattggtggtgtcgcttgggctgtgtctggggatgcaactcgctttgcggaagttatggttgttgcttctccatgtccactgttgatcgctgctcctgttgctttggtatcagggatgagttcaatgtcagctcaccatattattgttaagtctggtccaaccctagagaagttggctcgcgctaagacctttgcttttgataagactggtactttgactgaaaaccaattgatcgttgaccaagtcgttactgatgacaaatcatttgatcaaaaagaattgcaaagcttagctgccagtgttgaacaacagtcaagtcacgttatcgctagttctctagttaaggctactgacaaggatttaattcatcccgtaactaaccttaaggaaactaccgctcaaggtgttgaaggtgatgttgatggcaaacacgttaaagttggtaagttatcctttgttgcgccaggtcatgaaaaattaaacgtcacttcaactgctgtttacgtttcagttgacggtaagtttgctggttacatcactttgaaagataagatgcgtccagagagtcctaagactattgaacgtcttcgtcgtcaaggtgcagaagatatcatgatgcttaccggtgaccacaagcaagtcgcagaaaaggttgccaaagaagccggcattactgatgtccgctcagaacttttgccatcacaaaagattcaagctattaaagatgtgccaaagcacctacgtcctgtcgttataactggtgatggtgttaacgatgcacctagtctgaccgctgctgatgttggtattgctatgggtgctaagggtgctactgctgccagtgaaagtgccgatgctgttatcatggttaacgatatttctaaagttaacgatgcagtcgctatttctaaacacacaatgaaggttgctaatatcgatgttttaactgcaattggtgtcgttattatcattgaattgattgccttcactggtgttatcccagccttctggggcgctattttgcaagaagtagtcgacatgattacgatcagcttaggtttacttgctaagactaagccaagtgataagcaatttggtttggaagaaaaatagattagatgtgaagaagctccagaatcgatttggttctggagccttttttcatacataattatgcgtagcactgcaccagttcaatttgcatctaagttaaaaaactattaagattaaactcaactaaataatttttagtggttgggtttttatcacaataaaaactttcaagattcgcttctttgggtcaggaagcacttgaaagttttttgtttttttacagaaggggaaaatatgcattttttaggacaacttatcttaatcctcttaactacagttttgctggggcaattattcgcccgcttcaatatgcctgcagttattggacaactattatcaggaattttactgggaccagctatcttaaattgggttaagccaaatgatatcatcagtctattctccgagttcggggttattctgctgatgttcttagctgggcttgagagcgatctagatttattaaaaaaatacttcaagctaagctttactgtcgccacagtcggcgttatcctacccgttgttttcatgggcttagccagttacttctttggcatgcgccctcttgaagcactctttatcgggattgtctttgcagcaactagcgtttctatctccgttgtggtgctgcaagaagcacaccaactgcacacccgtgccggcacagccattttaggtgctgccgtagttgacgatatcttagccgtggttgttctgagtctattcactacattcagtcatgaaggtggcaagagcggcttaactaataactttttgcttaatatcttgattgaagtagtttacttcgtagttgtttggctgatttttaaatttgttgcgccatactttatgaaagcttctgaaaaaatcgacgttgactattccgtcgttatcggttcattggttttagccttaaccatggcttgggccgctgattttgttggtctttcagctgttgttggtgcatttttcggtggtttagcaattcgtcaaacaccacaatacaaagaagttcactcctctgtttccgcaatcggctactctgtcttcatccccgtcttcttcgctgatatcggtctttcaatgacttttgccagctttttcaaggatatctggttcattatcgttatgaccgttttagctattttatcaaaattctgggccggaaaatactccagcgaaatctttggcttcaataagaatgaaggcaatatcgtcggtgctggaatggtatcacgtggtgaagttgcactgattgtagcgcaaatcggaattaaccaccatctcttccctgaggatatttattcaagtctgatcctagtaattatcgttacaacagttatttcaccatttattttgaattactttattaaaaagagtcaaaatagtacggaatttatgtagaaaaagtctagcattcgctagattttttaatagtttaattttacaagtggcttatcataaacgcaattgtgtctacatggtaaaatcaatagtgagaggtgagaaatatgttacaaactccaaacaatattagagctgttaccgctcgtgacctgcgcaataattttaagaaaattgctgatgatattaatgactatgatactaccgttatagtagctcgtcccaaagataaaaatgttgtgattatttctcaaaaagaatatgattcatggcaagaaacttcatatcttctaggaactaaagctaaccgcgatgcattagctgaagctaaacaatcatttgaaaaccaagatcaacgaaataaagttttaaccccagaagaattcgaggctttaactaaagatgacgaagcttaaccttaattttaactacaatgcctggaatgaatatcttgaatggaaaaaagaggataagaagacttcccaaaagattgataattttattaaagaatgccaacgccatccttttactggaaaagggaaacctgagccattaaaagcgaatttaagtggtgcatggtctcgacaaagtaatcataaagatcgcatggtttattcagttaccacaacagaattacaaatatggcagttaaaataccattattccaaatgaaaaagctctttcgagcttttttgtttaacccaattttcctaaatcgattacttggtcatacttctgcaactcatttgattcatagtggtgaattacttcaataaaggtaaggtttgagtttaacaagtaattatgaatttgatctgatgtcttcttatcaagggatgcattaatttcatctagtagcaaaatcgatctatcggccaaaattgcccgtgctagttctattctagctagctgtcccccagacaattgatccgcattatcacccaaggaatagtcccagcccttttcagcaataatttgatccaaacctaatttttggcacacctcgctcaccttttcccgggaaatatttgcacctaaagttaaattaaaccacaaggtatcggcaaaaattactggggactggctagcataagcgaataaatctgtaaacgagcctggcttttgctttttgtcgttaagcaatatttccttggcatgaccatgctttccggttaataggaattgtaataacgttgatttacctacaccagatggtccaataactgcaactttttgaccttttacaactgcaaagttaatttgattagctaattccttgccttttctagtaagatccagatcttctatttgcaaatttgcaaaattataattggtctctttcttttcaaccttgcccttggcaatatatttttctgccttagcgacaattttcttagttgttgataatttgtttcgatcttctaaaatagtcaaaattggattaagaaatgaatttgacagttgaacgattgcaaataaggcacctaaagtagtttgacccttaaccaccatgtaaattcccactaagaatggggttaagaacgtaaataaactagcaatcaagttaatccaagaattagtatctagattgagtaagttcattttacgcaaagcatcttctaattgattgatcaaaacttgatttttcttaaccgcattatcgcgcttgttgtataaatttaatgttgtgctaccagccagaaagtttttaatatgactaacatatttatcattagcagttgtccaattttctgctgcagtttgaatcttcttttgaaataaattagaaaccagcatcggcaaacatgaaccgattaaaaataataatgtaactaaccaattaacacataaagcataccctagcgcaaaaacaatcatataggcctgcatcattatttcaatttcagcatcaaaacgattagtttccagcagcttaaaatctgtagtcaaaaagcctaagctagcagtattttcttcgctagtctgacccagcatcccctttaaaatgccagctcgcagcgtcgtattagtctcttgaatagcacttgtttttaaccgattgaaaatcagcgaagcaataaaagtcgcaataaacgccccaataacaataactagaaattgtgctaaatcgccaaaccttctttgcgtaccaacattggtcaatgtctgtaccatatatgcaaaaatgatttgttgtgtactagcaatcaagcctaaaatagttaacataatgaattttgcatgtgaagaatatttgtaaatcattttttgtcctcctgtattttacttgaggctagtatcgcaggataatgacgaaaaatgttagaaatttacagatctgcaaatcgaggtaaaacattatgttcaaatatggttcaatttacaaacaattgcgcaaagatcaagaaatcactcaaactgaagcctgcaagggtatttgttcaatctctaagttatcacgctgggaaaataatcaggtagaagttgagtttagcaccgccattgcattactcaggcgcatcaacattacgcttgacgaattcacgcattacgctgcaatgaaaacagaatttacattgccagacgacattataacggccattaaagacaatgatacaaaggtactcgaaaaatttgttcaggagcagctaaatcattatcacgccaacaaaaatattctcgaactcaaaaacatcattcttgtctgcaatcaattatttctcatgactggtaaaaactatctaacacctgcagacattaatcgaatcggttcatacctgcttcacaacaccgtttggtctaaatacaatatcttgctttttgctaactcaccgtttttgctaaattctaaaatcggctatcaaattgctctgcgaattattcacaattttcaccctacagaaagtttaaacgaaaatactactattttcatgggcggtttatctgatacagttattgccttagttttcaaaaagaagctagattacgctcaaaaaattcttaatgaattaaaaaagataggacttcccttctatctcatgttctttagttcaacattgacccttttacaaaaaattatcgactactgccacactctcaacgcacagcctgtattggcaatgattgatgccatagttcagctaaattgcatggaagttgctaaaaaatggcttgagatttttaaagacgtacaacaaatctggccagaaaaagaaaattaaaaaccgtaaaagtaatttactttcacggcttttgacatggtattcattatgcaagcttacaaatttttagcttttaattaatccttaacaacgtctttggtgttcaaccattgactcttgttgatcttaacgatcttcttgccagcagctttcttaacatccttagcggtgtaagttgaacccattgaaaccttttggctagtcttgtgaccttgtgcgtccaaaacattaactttttggttcttagtgtcctttacagcaacaaagatcttgtcaccctttttaattgcaggatcagttggcatagtttcggcaacacctaactttggagcagtaaaactagctgcttgactaactgaagcaccaacacccattaaactcattgaagcaactgcgattgaaacaactttaactaaattctttgaaactaacataatgaatacctctaatttctatatcacttaatttgttggaactttttgttccctcattccttacgtctttattgtataacatatgttattaattacaaggggtttatcgaattttttaaaaataattcagtcgtctcaaagtattgctataataacgattgcggggattttttgtccaaaagcattaaaaaagtgtctgagaaaccgttctttcccaaacacttttttaagcagctgctacttcgtttgaattttgagtcacttttctagtttttaaactgacaaaaatcgctacaattagtgttattacctggattactaataatgtaaccaaagcaacagtaacattgaatgaaccagaaattgtggttaatactgttgtcataattggagcaacagccattaagattgtatttaataagccaacagttgaagccaagattttatgatcaactgatgttactagccattgctccattttaactgaagcaactcctgcaatagctgccaagaaaaacattgttatcataattacgtaagtatttcctaggaaaatgcttgttgtagtaacaatacttaaactggcagaaataattactaaactaaaaactgttaattttttgaataattgtggtccaaacattgaacccaatgcaaagcctgcgccaataaccacaccaaacaaagcaatagtaaagctataagtgccgattagcatagttgaacgatgagctgcaagtacaattgttgtcaatggagtaattgtatctaaagctccatttaataatgcgattactaataccacagtcaataatcctgattgtttcttcacttgggtcaatgaagttttcattgtttggaaaaagttttgatcattaacttcctttttttcaagtggcttctgatccttctgatgttttaagccaacactggcaaataacaaacctgctaacaagaaagtacctgcattaacaaaggctaaagttgagtatgacattactagcaaaagtgctgaaccaatgaattgagcacccatactaataatttgatttacgccgccattaaagcctactgcattcccgtattcttttttaccaacaatatcaacaattaatggtgcaaccaagccacctgaatatgaaccaatagtatctgataagaaattcacaacaacgatgattaaaaccaaattccactgtgacattttagtgataaacaataatcctactaaaccatataagataaatcggacaaatgctgctaaaaagatattgcgaaactttttcttagtcttatcagcaaggtaaccaccaaagatctcgaataattttggaactgattcagaaattgcaattaatgaaagtgctaatgagtagttttgtaatttgctagcataagtcatgaaagccaagtagaaaagaatatcgcctgcgcctgaaagaaaactagctactgaaaatcttctaaagtctgcgtttttaagaaatacgttcataaatcttaccccctttttctttgtttcgtttgttgttgaaattataataaagtgaaaaagaaattaattttaaaaatggcgtattcgacattcggaggataaacctatgacaattggtgaattactcaaagaaaaaagactagcagaaaacaaaactcaaaaagcatgggttggtcatattatcagtacttcttattatgctaaagttgaaaagaatattcatagaattacagcagaggatttattagccattcttaaacataatgatctttcaattactgactttttcgaagaattagcagacaaaaaggatgaactaaaagcacaagtaaactcgctaaataaaacagtaattgatgctgtttatcattctgatgtttccaaagttaatgaagtcattcaaattattaaaaaaatggatctaccgactaagcaaaaacaagaacttatcttaatcaataaggggtttatcgaaactatcaaaaatgatctaagtgacaattatcagccagataaaaacatcgttcaacaactaaaagacaaaatttttagtattcctaattttaatagattcaaacttgaactctatactaatttcatgcaattttatgattatacaactaatattatgatcaccaaacaagtgatccataaaatagatcagtttaagagcgataaagagttattagcaatcgctggtattctattcaatctcctttcacaattagtcgaagaacatcattatcaagaaactgcaccatttatagcagctagtgagcatttaccctttttaccagacttatactttcctcaaaccggaatctcattgctaaaataccttattagttatcattttaataaaaaaacagcagacttagctaaagctgagatgattgcacaaacttatcaaattactggtctagaagactttggtaaaggtgcacaagaaattattaatgaagttaaagaggactagctttaagctaatcctcttgtttcaatctctaaataaaacctaacgcgttatagcacatgtgcaccaaaattgaatagcgcaaatctttggttgacatatagacccaagctaaaaccatgcctaagacccaatatactaagatatacttacttaatgccggatcatgcatatagccaaataaaaatccgcttgcaacaatacctagccacttatttctagtatttttcttagtgaaaaagatattgaaaaacatccctctaaagatatgttcctcacaaaatggcgcgatgaaaactactaggatcctaaataaacctgcattgtattccgctattttattcaagctttcctggttctttgaaacgccgccaccaactagattaagcatcacaatcgaacctactacaatcagtacaaaaccgatcatcgctattccgattctgcgccagtcccagtgtggtgtttcatcaaagccccaatcattttcttcttttaattgcctgcgataaatataggaaattgcaaacaaaactattaccgtagcaagcgccgtaacgaagacgcgatattgcgccaaatcaaatcgctgaggtctaaagtaaagtacttctaattcagaataaattaccaaagccaacacagcccctgcaatatttcccaggtaatgtccaaatctcttcatttttcattcacaccttgattctttcaactagtaatcattgtttctattataatgtaaataagaaaaaatacctaaggaggagtatctatctatgcttaatcagatcatcgcttttttggggagacgcggtgagttcttctacatttcagtctttatgttactgatattttttgcctttttaatctcttggcttatcgaaccaagacgtttgattaatggcgttttgtttactatctttatagtctcaatgctctcttggatcaccgttatggtgcacaaaagtacgagtcacggcttgcaacgtgcctatgacctactagttctagctgcattatttggcattgtcttattattaattttcgcctggatttttctattctggaatgcctatttcgtttggaaatatgaaagccatactttgcctaacttgcttactttaattaccggatttttagcattaattattagtattatcgtgctcttaggaccaggtaagtacttgccacgttggcttagtctcgcattagcttcaattcccgcgattgcaatttatttgggattggtgctttacaactttttggtaaacttgcttctatatcaaatttatcctcgtacctaccaccaagactatttaatcgttctagggtctgggctaatcaatggcgaccaagtatcaaaactgcttgcggctagaattaatcgggcaattcaatactctaaccgccagtatcaaaagggccgcaagcgccctatcctgatcatgtcaggtggtcaaggcgctgacgaaaaaatctctgaagcactcgctatgtctcgttttgcacaacggcgtggcgttagtgttgaccgtatcttattagaagatcaatcgaaaaacacatacgaaaacatgctcttttctaagcgtattgccacaaaagattttggtaattcccacttcagggcacgcttctttagcaataattaccatatttttagagctgctctcttggctaaggaagttggtttaaaagccaatggtgtcggtgcttacaccagattctactacttgcctaacgcaattatccgcgaatttgccggtgtgtttgtcatgcataaacgccgtcatttcgttatcatgggattaatcgttttattctttatcctgcaagctatcttagtcatgacaggattagaaagatttactgtaatttagaaaagagggatgcaatgcttcaactaaagcatatttttaagtcatataaggtgggggacaacatcacccacgctttagacgacgttacaatctcgttccgtgaccaggaattcgtcgctatcttaggtcctagtggttctggaaaaactaccatgttaaacgtaattggcggacttgaccgttacgaccaaggtgacttgatcatcaacggcaaatctaccaagaattttaaagagaccgactgggatgcttaccgcaacaataccgttggttttgtttttcaaaattataatctaatcccccacttgtcgatcatcgccaatgtggaactagggatgaatttgtctggtgtgcctaaaaaacagcgccatgaaaaagcaattgcggcgttaacagaagtgggattgaaagaccatctaaataaacgtcctaaccagttgtctggcggtcagatgcaacgagtagcgattgctcgagcaattgccaacgaccctgatattctactttgtgatgaaccaactggtgcacttgatactgagacttctgtccaaattatgaagttgatcaaaaaactatctaaagatcgactcgttattatggtgacccacaatcctgaattagctaaagaatacgccacaagaatcgttaatttccaagacggtaagattcgtcatgattctgatccttttagccctaataaggaagaagacaaatttaacctcaagcgtaccaagatgtcttactggaacgccatcaagttgagtttcaccaatattatgacaaaaaaaggtcgaactctgctaactgcttttgcttcaagcatcgggattatctcaattgccgtagttttagctatctctaatggttttcaaaagcaaatcaataccacaatgagcaaagctttagcaaaatatccgatttctatttcacagaccgcaactgacattacttcagctaatgcacgtaaagaatcggataaaaatgtcaaaaaccgcggctatgtaacggcagaacaagaccaaagcgaacaggcccaacacgttaataaaattagcacaaagtatgttaactacatcaagaagatcaatcctaattatgccaataacgtgtcttaccaacgcggcgtaagcttgaatttattagctaaaaacaagggaaaaattgaacgcgtgcaattttcaaatacggatcctgatcagactaattctgttctagctgctagatcccaagcgatgagttcaatgggactgggttcaagtgtctttcccactactttaaataaagagaaagactcatttttgaagcaaaactatcaattgctctcaggcacttggcctactaaggcaaccgacttggttttagttactgacaataaaaatactgttaacatcaatgccttaaaaaatcttggtttcgatttaaagaataaggaacacgtcaaattcggccaattagtaaataagcaatttcgtgtagttgctaacaatgattactatcagcaattgccaactggcatgtttattcctaaaaaggtaaataacgccatgtataacggtgctcaaaccaagctaaagattgctggtgtcattcgtcctaaaaacgaagattcaatggccttgttatcaactggaattgcttatagcgatcaactttcacaacgcgtgattaatgaaaataaaaactctgcaattgtaaaggcacaaaagaagagtaaccatagcgtattaactaaccaaaaactaaatgccaatgaaaagaaagctacaatgcagactcttggcggtaccagcatccctactggtatcatgatttatcccaacaattttgatgataaagataaagtacttgattatcttgacaaatggaacaaggggaagaaaaaatcagacaagattctctatactgacatgtcaaacgctgttaccacaatgactggcggcctcttaagcgggataacgaccatccttgtcgcatttgctggtatttcattaatcacatctatgattatgattggtattttaacttatacctcagtacttgagcgaactaaagaaatcggggtactcaaggcattaggtgcccgtaaaaaagacattactcgtgtctttgatgccgaaaccttcatcctaggtgttttctctggtgtattaggcattctgattgcttacctactaacattcccaattaacagtatcatttacaagattactgatctggcaaatgtagcccaactagatcctactgctgctattgttttgatcattatttcaactatcctcaccctcttaggtggtcatattccagcacgaatggctgcaaagaaagatgctgcaattgcattgcggagtgaatgaatttaataaagaatttgttacgttgttcacaataacctaaatttttagcaaaatatgtggtatcttagctttagcaaaaacaagtaagaaaggaacttttttcaccatgactgttaaaaaattagaaaataacagcgatgttaatgtagtggcagaagaaagcaaagttttaactgatttattgaatgaatcaactaagcaagtaatcggtcaagcagctttcgataagatccaaaacttaattaaaatctctgccgccaaagattatcaagaacttgaaaagcaaattgctagtcttaacaatcgcgaaatgattgttgttgcacgttattttgctactctcccactcttgatcaacatttcagaggatgtagaactagcaagtaaagttaatgtgcttaacaatactcatcaagattatctaggtaaattgagtgacacaattgacattgtagcccaaaagaaaaatgccgaagaaatccttgaacatgtaaatgtagtacccgttttaactgcccatcctactcaggtacaaagaaaaaccattttggaattaaccgatcaaattcatcaacttttgcgcaattatcgtgatgtgaagaatggcacaattgatcgcgatgaatggactgaacaaatgcgggcttgcattgaaattttgatgcaaactgacattattcgtggtcacaaattaaaggtagctaatgaaattaccaatgttttggcttactaccctaaggctttaatccctgcaatcaccaaatttactagtcgttacaaggaattagctaaaaaacacgggctaaacgctagtcatgctacgccaattaccatgggaatgtggatcggcggcgaccgtgacggtaacccttatgtaacggctgatacgctagaactaagcgctactttgcaaagccaagtaatctttgaatattacattaagcaaatcaataagctttatagagccatttccatgtctacttcttatatggagccatctgacgatgtaatgcacctatctgagctttctaatgatgattcaccattcagaactaacgagccatatagacgggcattctactatattcaaagccgtttagtgcacactgaacaaaaattactgaatattactaacaagaacactttcttaaagaaacgtgacctccaaaatcttgataaaatcccttgttatcaaaatgctcaagaatttaaagccgacttagaaatcatcaaaaattcacttgaagaagaccatgatcacgccgtagtagacagctactttactcaaattcttgaggctatcaacatcttcggcttccatctagctacaattgatatgcgtcaagattctagcgttaacgaggcctgtgtcgctgagctacttaagagtgctggaatttgtgacaattatagcgatttaagcgaagacaaaaagatcaagcttttactcaacgaattgaacaatgatccacgtaacttacacgccaataacaaacccaagtctgagttactacaaaaagaattaaagatctacaagactgctcgtcaattgaaagaccgtttgggtgaagacgtcatcaagcaacatattatttctcacactgagagtgtttcagacatgctagaacaagcaatcatgttaaaggaatacgatttacttgataatcaaaaagcccgaattcaagtggtaccactatttgaaacggttgaagacttgaataatgcccgggaaataattaaggaattcttaagctttgatatcgtcaagaagtggcttgtttctcaaaataattatcaagaagttatgttaggctactcagattccaataaggacggtggctacttagcttcatgctggaacctttataaagctcaaaaggatctaactaagattggtgaagaaatgggtatcaagattacctttatgcatggccgtggcggtaccgttggtcgtggtggtagtccatcatacgaagcaattacagcacagccattcaagtcaattaacgatcggatgcggatgaccgagcaaggtgaaattatccaaaacaagtatggtaataaagacaccgcctactacaacctagaaatgttagcttcagcaacaatcgatcgaatggcttctaagcaaattgttagcgaagatcatgtcgcagatttccgttcttcaatggatcaaatcgtagctaaaagcaacgaagtttaccggaaactagtatttgagaatcctaacttccttaagtacttcttccaagcaactccaatcaaagaaatctctggtcttaacgtaggttcacgtccagcttcaagaaagaaactcactgacttttctggcttaagagccatcccttgggttttctcttggtcacaaagccgtgtaatgttccctggttggtatggcgtaggttctggtttcaagtcatttatcgatgctgatccagccaacttgaaggaattacaaaatatgtaccaaggttggccattcttccactccctgctttccaatgttgatatggttttatctaaatcaaatatgagaattgccaagcagtatgcggatctttgcgaagatgaacaagttaaatcagtctttgatatcatcaatcaagaatgggaactaactaagaaagtcatcctacaaattgaaggtcatgatgaattaatcgaagatgcacctactcttaagaagagtctggaatacagaatgccttacttcaacattttgaactacatccaattagaaatgatcaagcgtgatcgtgaagatgtgattcaaggtgtttaccaaagtattattccaattactatcaacggtgtggcttccggtttacgtaattcaggataaaaaacacataaaattcagctaaaaaaggctcctcattgcctgttttatcaagcatttgaggagcttttttttaatttattaaactttttagttacgcctttttcataactaagttaagtggcgttacaattactggaacgacaatggctgtaaaaattgcttctactaaaccgttcatgcccagtgccataattaaaattaaaatcaatggcgtacctgaactataatttcctaggtaatgagttaagcttgctggatcatgcatgaagaaaatactcgtcagcaaaataaccatcacggtattagttaacgaagtgactgctccacttatgatataacccaatttcgcatatttagtcttactcatacccttcgcaataattcccgggaaatagccagccaaaatacttggtaccaatgaaattaccggattttggaacaacattaagctgaccatatcgccaggttgagtatatgcaacaatcaatctggtaataccccagaataagccaaagcctagacccgccttttgtcccattaacgtgccatagacggcaattgtcattggaatagtagttacagctggcaaagccgggataattcttacatagccaacatttggcacaaaagtctgtacaatcaataaagcagcaaagacagcagtaattgctaatcttttagtttcttctcttctcatatatttctccaacttaattctttagactcaattaaaccataattaagattttttctcagcaaaaaagtttattatacaatatctaggtatattttatctaatatgacaagatattgtattttttattatttttttacttaattatgcattatccttactctctctaatgcataatcgtgttctataccaattaagaatccctttatatcaatactttatgttgtatgtcaattttgacatagccactaaatattgttaatctcgttttgtgttaaaaatcatttgatggagagaggatcaattttatgaataaaaaagtcaaaaaattactatctattggtgtgcttgcattgagtttaggtgcaattttaaccgcctgctctggtaaaaaacagggtgcaagcaataataaatcaagcgatgccaagcactctattgcattaattactggcggtaatggtgtaaatgataactcttttaaccaatctgcttgggaaggatttcaaagttatggcaaagagcacaacttgagccgcggtcgaaacggttatcaatattttcaatcaagtagtgctgctgatttcactcctaattttgatcaggcagctaaagctggttatcaaactatctttggcgttggttacagtttaaaagatgccgtagcttctgccgccaaacgctatcctaaaaagaattttgccattattgacgatgtaatcaagggacaaaagaatgttgtctcagctaatttcaagagcgaacaagcttcctacttggctggtgtcgtagctgctaaagaaaccaaaaccaacacggttggcttcatcggcggtgctcatggcgatattgtcgacctttttgatgccggatttactcaaggtgttaaagatcaagccaaaaaaatgcacaaaaaagttactatcttaaaccaatatattggcaactttactagttcagacaaggccaaatcaattgctcaatcaatgtacaccaaaaaagccgacatcatcttccatgctgctggtggtgctggtgatggtcttttccaagaagctaaagccattaatcaaactagaccagctaaagataaagtgtgggtaatcggagttgatgtcgatcaatctcatctcggtaactacactgctaaaggtgggcaaaaatctaattttgttttgacatcagtaataactggagtaaatgttgctgtcaaagatatcgccaatagagcttataataataaattccctggtggcaagaatttggtttatggacttaaaaacaatggtgtttctattgaacgaggacagatttcagcttcaacttggaaagatgcccaaattgctagagctaatatcctaaaaggcaaaattaaggttgccattcatcctaacaataaataaaagcatactagtatagtttgctttttataattacaatcaattattttttgcctgatcaatatttttgttgacaaaataccgaacaattaataaacttatttataaattgttcggtattaatattgtggaggacagaaataatgaacgtaaagttcaagaaaattttatcatttggtgtcgttttagcatcagttggcttgattctaactgcttgttcgggtaaaaagtctggtcaatcagccaacaaagatactaaacatggcattgccctaatcacagatgaaaatggtgttgatgatcattcatttaaccaagctgcatggtcaggatttaaagcatacggcaaggaacatggtttaaaacaaggaaaaggtggttatcaatacttccagtctagcagtgccgcagacttcactcctaactttgatcaagccgctacagccggctaccaaaccattttcggtgttggctatcaattagccgacgcagtcaagcaagcagccaagaagaatcctaaaaagaatttcgttatcattgatagcgttgactctgggattaagaacgtcgcttctgcaacctttgaaagcaatcaagcttcttatcttggcggattggccgcagcttacaccactaaaaccaacaaagtaggtttcattggcggtgctaagtcatctattattgatttattcgaagccggttttaagcaaggtgttgctgacggtgctaaagctcttcacaagaagatttcagttcaaacccaatacatcggtaacttcacttcaaccgataaggctaaatcaatcgctcaatcaatgtatgctaaccgcgctgatattatttaccaagcagccggtaacgcaggtaacggtgttttccaagaaggaaaagattacaaccaagcccgtccagcagctaaaaaggtttgggtaatcggagttgacgttgaccaatctaacctaggtaactacaagtcaaaagatggtaagaaagagaacttcactttaacttccgtcttaaagggcttagatgttgctactaagtcaattgctaatgatgcttacaatggtaaattccctggtggtaagcacttagtttacagcttaaagggtaatggggtttaaatcaccaaaggtaatttaaacgctaaaacttgggcagcagtacaaaaggctcgtcaacaaattattgatggcaagatcaaggttgctactgctccaactaagtaattcagctgcttagtattttgagaactcttcgttttttagcgaagagtttttctatagttaattaaggaagtatttatttacatgaaagaacagagaaataaagtaatcgagatgcgtcatattgtcaaagatttcgatggtttcaaggcaaatgacgatattaaccttacgctctatcaaggtgaaattttggctttgcttggtgaaaatggcgcgggtaaatctaccttaatgagaattttatccggcttgcttgaaccaacaagcggtgaaattctggttaataatcaaaaagtaaatattaaagatccaaccgtcgctaaaaagttaggcattgggatggtacaccagcacttcatgcttatggactcatttaccgttttagaaaatattattctaggacatgaatcaactaaaggaccagttatcgatctgaaaaaggcaagaaaacaggtcctagctcttgcacaaaaatatggctttgctattaatccagatgccaaaatctctagcattactgtcgcccaacagcaaagagttgaaattctaaaggtactttatcgtggtgcagatattttaatttttgatgaaccaactgctgttttaaccccacaagaaatttctgaatttattaaagtactcaaaaatttagctaaagaaggcaaatcaatcattttgatcactcataaattagaagaaatcaaggctgttgcagatcgagttacagttatcagacgtggtcacgatgttggtacttttgctgttgatcaagttagtgatgagcggttagccgaattaatggtggggcggcatgtcaacatgaagctaaccaaaccagcacctaacttgggcaagcaaattctagcaatcaaaaacttacaggtaaaaggaaatcacggtgccttaagcgttaaagacctttccctttcaatccgtggaggcgaaattttagggctagccggaattgacggcaatggacaagatgaactggttgaagcaatcactggtttacgccatgttaagtcggggcaaatcttaattgatagtcaaaatttaaccaaccaaaaagttcgcaaaatcaccgaagctggcgtagcgcatattcctgcagaccggcaaaaatatggtttaattcttcacatgtcattagctgacaacttagcgctgcaaacttactaccaacgtcccttctctaatcatggcatcattaatcatcaagcaattttgaagcatgccgtagatttaattaaaaaattcgatattcgaactactagccctgcattgccagctagcgacttatcgggaggtaaccagcaaaaagcaattatcgctagagaattaaatagaaacagcgatctaatcattgcattccagcccactcgcggtttagatgttggtgcaattgagtatattcataagcagcttttagctcaaagagcagcaggaaaagctatcctattaatttcatatgaacttgatgaaattatgcaattatctgaccggattgctgttttgcatgatggtcaaatttcaggcgaagtattacctgaaaaaactacagatcaagaactaggtcttttaatgaccggtgttaagaaagaagatgcaacaattgattaaagttacacctaaagtcaaaaatattctagtaccagttatctcagtaattgctggttttatagttggtgcaattatcatgctgatttggagttataatccttttcaagcatacagctccatgttctctagcgcactgggcaatatgaatggtattggtgaaactattcgtgaagctacgccattaatttttattgctatcggttttgcaattgcctcaaaagctggcttttttaacatcggtttgccaggtcaagcacaagctggttggttgacttctatttggattgtattggccaatcctcaattgcctaagccagtattattgcctttagctattattgcaggcgctatagctggtgctattgtggcaggaattgctggctatttaagagctcaatttggaactaatgaagtaattactactatcatgcttaactatattgtgctctatacttgtcaatatttaatgcaacaagtaatgtcctcaaaattaagaattgataccgatactaccaaaacaattccagccaatggcagcttaaagcttaactggttaactagcatgtttggtgattcgcgaatcaatgctggtattttcttagcaataattggacttattttttattggtatttaatgaaaaaaactaccgttggttttgaaatcaaggcagttggactcaatccttttgctagtcgctatgccgggatgtcttctaaaaagaatattattatttcaatgttactttcaggtgcattttctggcttaggcggtgtagtacaaggacttggtacctaccaaaactacttcactcaaacaactagtttggatattggctgggacgggctttcagttgccttacttggtggtggaactgcaattggtattttattagcttcacttcttttctcaattttaaaaattggtggtttgggcatgcaaactattgccggtattccttatgaaatcgtatctatcgtaattgctgccatcattttcttcatcgctatcaattatgtcattggtttgctttttaaaactaagaagaaccgcagtgattactacattccaaccagaaaagaaaaaggacccaacaatggtgttgatggtccaggtagaaaagtaatcgaaggagaaaaataatgaatttcgttacaatgatggcgttaattgtttcatccactttagtttattctgcgcctctaatcctagcttctcttggtggtgtttacagtgaaaactctgggattgttaatattggcctggagggtatcatgaccatgggagcctttgcggcgattgtcttcaacctaactttcgcttcaacttttggtgcagctgctccttggcttggcactctagtcggcggaattgttggtttgattttttcattgcttcacgctgttgccacaatcaattttcacgctgatcatgtcatttccggaacagtgctgaacatcatggcaccacctttgggtgttttcttgatcaaggcaatttatgataaaggccaaactgaaaatatcaccgctaactttggctacttcagctttcctggtttaagcagcattcccatcgttgggccaatcttcttcaaaaacacctctgcccctgcttggattgccattattcttgctattttgatgtggtggattttatataagactcgctttggcctacgcttacgttcatgtggtgaaaatcctcaagcagctgacacaatgggaatcaatgtctatggcatgcgttatgcaggtgtattaatttccggctttatggcaggtcttggcggtgccgtctttgctcaagcaatatctggtaacttctctgtttctactatcgttggacaaggattcatggctttagctgccgttatatttggtaaatggaatccaatcggtgcaatgctctcatcccttttctttggttttgctcaaagcttaagtattattgggcatcaactgccaggaatcgatcaaattccatccgtttacatgcagattgcaccttacgttattacaatcatcgttttggtcctcttcctcggcaagtcagttgcacctgccgcagatggggttaactacatcaaatcgaaataaggaaaaaaggttgtttcacatgaaacagccttttattttacacatgtccacatagttatccacaagatatagcacttatatgtggtagtcttactatatcttgtactaaataacagctatcggcgttttctcagttggcattggaaaatcactgttaagcaatctaagctcatcatctgtaagtttaatcttttgtgttgcaatattttccttcatgtgttctacactacttgccttaggaatcgttaaaacattgccattgcgcatcgtccaagctagcattatctgatgaggcgtaacgccatgatcacgtgcaacaattttcaaattacgcgtaattcgaattgtgttgcccttgcctgaattaaatggtgaatacccaataaagtttacaccgtgctcttcttgccaagcttgcagatcaaattctgtcccacgttcactgatattgtataagtcttcattagcaaagcattcttctccacctggcactgtaaaaagctcctgcatatcagccgtatcaaagttagatacaccccaataacggatcaagccatctttttgtaatgcttgtaagccgtggatcgtatcagacaagcgatgactgccccgccagtgtaatagataaagatccagatgatctgttccaagacgttttagactggcttctagactctgacgttctagttttggcgttgcatgataggggtagaattttgaaatcaaaaataatttttcgcgatcatatcctttaatcgcttcaccaattagctcttcgctttggccatccccatacatttcggctgtatcaattacactcaggccatgatcaaggccatagcgaatagctgctatttcatcttttttctttttaggatcttcacccaaaccccagctaccaattcctaaacctgttagtttttcaaaattcatcctcgttcacttccttatgttcaaattttaacataattgattcgtaattatttttatcaatcaattgacaaaatggtctattccattttataatggactagaccaacaaatgaggaggacttaattatgaaagttattgttaccgaaaataaaattcaaggtggagcaaaagcatttgaaatttttgaaaaaggaatcaagaacggtgctaaagtcttaggtttggcaaccggctcaacccctgaaacactttaccaaaactgggtaaaaagcgatcttaactgtgaaaatcttaccagcattaacctcgatgaatacgttggtttaaccccagataatcctcaaagctaccactacttcatgcaaaagcatttatttgacaagaagccatttaagaagacttacgttcctgacggtatggcaaaagacgttgatgctttttgtaaagaatatgatcaaattatcaaagacaatcctatcgacattcaactattaggaatcggccgcaatggtcacattgcctttaacgaaccaggcactccattcaacatcggcactcatgaagttaagttaaccgaaaatactatcaaggctaatgctcgcttctttgacagtatcgatgaagtgccaaagagtgctatctgcatgggtactgctaatattatgcaatctaagaagattgttttgatggcttttggtgaaaagaaagctcacgcaatcaagaaaatgattgaaggcaaagtcactgaagaagtacctgcatcaattttgcaaaaacacccagatgtaacggtgatcgtagacgaggctgccgcacaagaattagacgacaaatacaagaactaaaaacaataatttaattatcagcatagaaaaagctaggctttctacaatcgtggaagacctagtttttttatttagcagcctgtatctacaatgaaatatacttcacaaaattgcatttttatataaaaaatgaagcataattcagttttttattgaattatgtttcattcctattcgattttttatttctacccttgacttttagatgtgaaacataatcaaaaaatcacttgtgtgccacaacatatcgtattaaacttaataattgtctacatatggtatttaagaaagaatgtgattcaagttattgttttaagtgggccaattggagccggtaaatccagtttaaccagtattctagctgaacatttagggactcaggcattctatgagggcgttgataacaatcccgtattgcctttatactacaaggacatgaagcgttacacttttttgcttaacacttacctccttaaccaccgtttagcacagatcaatcaagcaattcaagaaaaaaacagtgtctccgatcgttctatctatgaagatgcactgttcttcaagatgaacgccgatagcaaggtcgctgatccaaccgagttcaagatctacgatgacttactcgacaacatgatggaagacactcctggcaatccaagtaagaagcctgacttactgatttacattcatgtctcccttgatactatgcttaaccgaatcaagaagcgcggtcgttcatttgagcaaatcagcactgatccaggtttgaaagattattacgcaagacttttaaagtactacgaaccatggtatgaaaattatcatgcctcaccaaagatagaaatcaatggcgacaaacttgattttgttaccaacatggatgcacaaaaagaagtacttaaagaaattgatgaaaagttgcatgaaatcggcaacttataagaaaaagaaggaacgtgatgacagttattgttttaagcgggccaattggagccggtaaatccagtttaacaggtattttatctaaatatttagggactaagcctttctatgaaagtgttgatgacaatccagttttgccacttttttacgctgaccctaaaaaatatgcattcttattgcaagtatatttcttgaacacacgcttccacagcattaaagacgcgctcactgaagataataacgtcttagatcgttctatctatgaagacgccttattcttccaaatgaacgctgatatcggccgtgctacttctgaagaagtcgatacttactatgagttattgcacaatatgatgggcgagttagaacggatgccaaagaagaatcctgatttgcttgttcatattaatgtttcatatgatacgatgatcaaacgaattcaaaaacgtggtcgtccctatgaacagttaagttatgattcaactttagaggactattacaagcgtctgcttcgttattacaagccttggtatgagaactacgattactcacctaaaatggaaattgacggtgataaattagacttcatggctaatccagatgataaagaaaaagttttggatcaaattacagccaaactaaaagagatgggcaaattacctgaagattgggaaaagcctaccgatattcaaattgaagcataataaaaaccattcatttgcgaaattatcgtatttgaatgattttttgtttacagtgaatttttcgctttattgttgtataatttgaaaaaatgtgtttaaaggaggagtttgaaaatgatgttaaccgtaactggtggacaatggtttttcccacttgtcataatttgtctaattttgggtattgtcgcaaccatcgctcaaaagaaaaagctgactaaactaaaaagaataaccgataactttgcctatgcaatattagttattctcttaatcattgaatggattctatattttcaaaaacaatttaattttattactccagcaatctacacccttgttgtcatctatcttattggacggcaattactaatcagataccgttcttctctattgaaaaaattaggggctaaatataagcaactgacaattggacttgctactatttacattattttagttaccttattgcttttaatcggatctaaattttcaactatgggctggatcattgctggattagttatcgtagcctttggcttcgttagctacatctttgaaaaagacaaacaataatttcccaggaaataataactcgcatagagcttctatgcgatttttatttattcaatttttgctaatgccttcgcaaccccatcatgattgttatcagcagtaatttgttccggagcaaatttttgttttagttctgctggggcattacccattaaaaatggataccccacttcttccaacatatcttcatcgttatagttatcgccaaaagcaatgcaattttgcaagtctacgccatattcttgagcaactattttgactgcactagccttgcttacaccctttaaaacaaattctaataaattctctgctgatctaacaaaagtcaaatcaggatatttagcagttaattcttcttgcatacgatcaagatccgctgaatctcccataattagacctttatgcacgccctgcagtttttcaagttgattaattgtagtcggtgttgcttttacatcgacaattctttcttcatttttaacccgtgggctcttttcttcactacaataccaaacatagccactatagatattccaagctgcatcattatcttgctcatcaacgtagcggcaaatttcagctgcttcttttgcattaaaaaaacggctgattagtactttgcctgtttcatcaagggctaaagcaccgttatacgcgataaacggacaaactttcaaaatttgattaaccactgtcatcatccctttaggaagacgtgctgatgcaggaacgaaaatattaccattaataatttgtctacgaattgcatcccgcgttgcggcggttacctttaaatcatcattaattaatgtgccatcaagatctgaaaaaataagttgtgcggacattctttcacctttatttcttttttaattcttatatcctaggataatgctttatttatgctaatgaaagctgattcaattaaatgcttttcctatcatttaaagataaattgcaataaatgcccaagtaatcattaaaataattcgcgtttacaaatttatttatcaatgctaaagtataagagttgtgttcaataagttaaaacacgaacaatattttggggagataaaatgaattttataaaaagctactttcaattagataagtacaaaaccaacattcgaactgaatttattgctggtttaactacctttatcagcatgtcctatattttgtttgttaaccctagcgtactgggcgccagcggtatgaataccggtgcagtcttcaccgctactgctttagctgccgctcttggtactgcaatcatggggatcgttgccaactacccgatcggtgaggcaccagctttgggaatcaatgccttctttgcttacaccgtatgtattgggatgcatgtttcatgggaaacagccttggcttcagttttcgttgcatcaattattttcatcttaattactttattcaaattaagagaaaagatcattgattcaattccagctgacttgaagttcgctatttcatcaggtatcggtttattcattgccttcttaggtttgcaaaacggcaagttaatcgttgcaaataaatcaactttggttggtttaggttcacttcacgatccacttgtttggattaccatttttggtttgcttgtaactgttatcttgatgatcttaaacgttcctggtgcaatctttatcggtatggttttggcagctatcttcggtatttgtaccggtcaaattgcattgccacacaaggttatctcaactgctccaagtttggctccaacttttggtcaagctatcttccacgttaaagacattaacactgttcaaatgtgggttgttgttttaaccttcctgcttgttactttcttcgatactgcaggtaccttaatcggacttgctcaacaagctggtttcatgaagaacaacaagatgccacgtgtaggtaaggccttagcagctgactcaagtgcgatggctgttggttcaatccttggtacttcacctgttggtgccttcgttgaatcaagtgctggtatcgccgttggtggccgtaccggtttaaccgcagtttttgtagcgatctttttcttaatctcaatgattttcagtccattgcttggtgttttcactagccaagttactgctcctgccttaatcattgttggagtattaatggcacaaaatactgctcatattcattggaacaagttggaaattgcagttcctgcattcttgattattttagggatgcctcttacttactcaatttcagacggtttatcatggggcatgatcacctaccctatctgtatgcttgctgctaagcgtggcaaggaagtcacaccgatgatgtgggtactgtttgtagtattcctgatcttcctgtgggtactgaacttttagatgaaaaagaatagataaagaaaaggactaagttcgaatttgaacttggtcctttttgtgtattcactaacattactttttattcttatcgattataatcgataaaaacgtcaaaatcaccaatcttatcgagtataatcgataagattgcaaaaaaagagtcttttatcgactatactcgataaaggctcttttttatattacccaggaaatattaacgtacagtttctaaacaatatgattttttataataaaatgcgtcataacaggcgaattttaattggctttaaaatttcttttttctaaaaacaagatagcctaaaagggtaaaaagaactatatagcacaatgtaccaattaataattgtggattagagagatgggaggttaagtgataagttgcataattataatactgtgtcgttaaattgagcatattcaaaggattccaacgaataatatcaaccggtccaatattataatttaataaattagatgatagactgcttcccataaagataataattgcatttatcataataactacggtgtttgaattaatcatacaagacattaagcaaataaggctgattattaacgtagaggttataatatcaacgcctgttgttgaaagcatatttataaataatgactgattatacttataagtcgcagtccaaggaactatttttgctataagtggaacagtgttaaagaagatagttacaatcatagctatggcatgtagaaaaagattataaataaaaattgtaatgaactttgcaagatatactgttcctttattttgagcatgatatagtaatgtcaaaatcgttttgttttggaactccattgagaaaatagttgaacctactatgaccaaaatcaacataattatttggctagagttataacaagtcataactaacaaattgccatattgttttcccatggccaatcccataaaaatcataaaaagaatcataaaactgataatccaccaaggcagcttacggtgacctaacttatagaattcttgttttaattccgcacgcataaaagatcacctccgcctaaatagaccgctttttaaacagtaaagcgccaatccaaaagaaaactacagcgtacactaaattagcaataattaattctgaattagtcaaatgtgttacagtaaccatctcattattcgatagttgcgtaatgatattaatcatatttaatggattccaggctaaaattgatttcaaaccaggaaaagccgacattgctaaatttgaaagatctgaaccaagaaatccgattgctagtccgattatgatcactgttgcattattcctaatcaacaaaataagcattaaagagagggcaacgataaatattaaataaatcatcgttcctcccatatttaggaatagcgcattgattaagggatgtccatgataatcatcatgccaagaaaatttcgaaccaaccatcaaggtcttgagaataaacgaaaagattatcccaaataccagtaagatgaaactataaaaaactaaaacaatgaacttagctgtataaagaatggacttatgtgatgttttgtagagtaaggttgccatagtattatttcgccactccattgcgatcatatcagaactaatagcaataatgatgataatagcccattgtcctgcaccgaatccttgagataagagtgagggcgtcattttataacttgtaccaactgtatacaacattagtactaataaaacgagaatcccatacaatggaatcttgcgatgagcaaatttatagaattcgtgtgagagattaattttcattattatctcccccttgttcttgccgtaagatgttgacaatcttctgttctaaagttaagccagttggagccaaatattctatccagatttcattatcaaacagtagcttttgaattttatctatatctttatgatcaactattacagcatcatcttgtctatcaaaaggaattttagcttgttgtagcaaattggtagtttgctttatatcagttgtttttaatttagattttggatttttttcttgagtgaatttgctcataggtgaatttataataattctaccgtgattaataatgattaccgatgtcattactttttgtaattcacttaagacgtgactggaaattaagaaggctgtaccacgtgcagcgtattcatgtatcagttttcgaattaagattgtagcttcaatatccaaaccattcataggttcgtcgagaataaccagttgcggattatttaacaaagccaaagctattcctagtttttgcttcattccaactgagtagtcttttgcctttcgatcaatataatctttcatccctaatcgattaatcagtttatccataccacttaagtctttagcatagagctttaaattatcatatccagacagaaaaggataaataacaggcttttcaattaaagcaccaacagattgtagtgctaaatgatctttaagagtaatttcgtgatcattaaaactaattgaaccagtgaatttagttaatcctagcaaagttttcataatggtggttttgcctgctccgttatgaccaataagtcctacaatttcaccaggtgaaattgtaaaagatgcatctctaataatctctttgtgaccataaaaaatatttatattgttaacttttagcatgctatcctatctcctttaactccggattagacagagagttaaatcacttttctaattaaagtacctatattaaagtctagtatcctttcctgaattgtcaaattaagtgcaacagtgtaagtgtcaatgtttttgcggtagcctttaaaccattagtctaaccttaatttcttaaatatttatatgacttaaatttctgcttagcttgcttaaataactattgccagctacctgtgcggttaatgcgccatgctggatgcctaaatgaacttcatgacgcttctttaagctgtcacgggccgctgcttttaattcctgttcagtcaatacagttatttctgaatcttcaaactcgctgctaagccaaaattccagctctcgattcttgatgcagcttaagatcctaagcatgccttctgctccagattttgaccatttcttgccttgccccttaacacggtaggtatacttgcggtggttgctctcgcagcagccaatggctttagtcacagtcagttttcgtttcttaaacggcttaatatcgtcccaatgacgatcaatataattccttaggcgccccagataatcatgattgagctcggtattcaattcatcaattagtcggctttctgcagtggttaggatagttttaactttgtcatagctgtatttgtattccaaagcagaaatcagcttgccttgcaggtcaggcgcaaaatatagcctttctttgattttcttatttaggtgaaagacatccaagaaatgctcatgacgcttgcatagccctacaatgtcatcgaagtctgttttggcatatccagcaccgccatcggcgttgctaagaattacagtatcagaaagatcataagtattggccaggtactccttggcttcgttcagcgcatcaagtcggcttaaagaaacaaattccttggcattgattcgctttctgcgtttcttgcttatattgacaatgccttcacagacctgatagcgatgaaattccaaccggcttttagtgcctttgatcaccacgccatcgccttcaagatacaaaactgggacctttttcttagtgcctgcggcatcatatcttgaatctgcttcttggcccgctttaatatttttcccggccatttttaccaaattgcccacctgcatatggctaatattaaagccagacaggcaattgactgctagagcagtattgcgataagtggcaacgctgcttacttctaagatgtttttgactgctaaaatactgtagcgcttgtatttgtcaaagcccattaattcatccaagggataccttgcttgtttgcctgggcagacatatcttcttctgacatacctaacttcgccaaaagccatattgattgagcgctcattcttcttatcaatctgatagccctgtgctttaaccttggtaatcatttcatcatcaactttagctaaagccaaggccatgatttccttaatcaggtttaagaagaaacagattatttttctttcacgcttaatataattatcttcagactttataatatttgcgatttcagttacaattgaattcataaaagaccagcttctaatgtgttttttgttcttaacatcagactactggtctttttgtttgagctcaagtccaaattcaaaggacttgggcttttttaattatttattcaacttaccgtaaaaaattatacacttaggcaacagttaggctatgaagaaatatattgcttgaagagttcttctgctgtctgatattggaggattcggcgatatttgtggttaatggcattggttgcctgttgaacataagcttttgacttgtctttcatgctcttgcccttagggaagaattgacgcaaaagaccattgcagttctcatttgtgcctctttcccaaggagaatatggatgagcaaagtagatctgacatcctttgattttggtcatatccgcaaactcagaaccattgtcaaacgtaattgatttaaaccaattaggatgtctgtcaatctccttttgaagcagtctttgacaagtactggcccgatagtcaggaattttgataacaacctcaaaacgagtggttctttcagtcagtgtcattaaggcaggttgatttttacgtctgacgcctttaacccaatcgccttcccagtgcagggaaacttttctgttttcaacttctttaggccgctgttcaatcgaattgccaagattctttttatgcggagcatggccaccatgactatgatggcgtttgtttctgcgtcttttaagcttcattggcaggtcgatattgcttatatccagcaatccttgatcaatataacgatagacagtgggcgtgctaggacatggataatttggcataatcctgtgaaattcaccaacgaattcatcaatgctagtggcatcaaatttggctttaaagcgtctgcttagcattctgaaaaagacggcatagtgttgcagtggattacgcttatagcagtttctgcggcgcttttcatgataaatttgtgcagtaatagtgctcatacaagacatagctgctgtctctttgcaggacactgcctcgtctaatttcacggctgatagttgatttatgacagcctacttcttgagcgatagcattgcaggaggttatgccagaatcaagcagagcttgaatttgtccacgttgttcgctgttcaattgatgataatgcttggaaatgctagaatttgagttggtcatgaagatcttcctttcttgatttttggtcacttcaagtttaggtcttcatggcctttttgtttaacacttagtgttgcacttcaattttaaatccgggtctagtatccttttaataaatattttttactatgttcacatatgaacaataaatttaagattatctctaataaaaccgattttaggatttttttgaataaatttgctttatttgtttaaatgcagtttcaaaaccatcttttagagtattcaagccctgcagttctaaagcggcccacatcaaccgtaaattgcgatcatcatttgtttccaaaaaatttaacataaaatgcatgtatttgtatcttattttttcaaaagcaaacctgtctgtaatatctaagccagaaattattgcatctaatctttttgccttctttagatcttttttaataagaatatattctgcattaatcaaagtatttaaaatagctgtagaaaatttcgaaactgtcaaatcttttgtgtaaatagatctttctcgtaaattgattttttaattatttatttaatcaaagtaggattctaaggtgtcctgaacctgaccaaagcctttatgaattcgattgaaataacggtcattgtagctcattgcctgaatgccaataaaagcatcaagcgactgttcagttggaaactctgccttaggcttagctttgcgcttgatcacattgttaaatgattcaatcatgttagtcgaataaattgaagctctgatctgcttgggatagttataaaagaccagcagatctggttctatgtctttcaagcttctgataacatggctgtaaaccttgccccatttggtatagaagtcatgcaggacagctgtggcttcttctttgtttgtctgttgatgcacctgtttgaattcgttcatgatcttttcacgatcgtcgacgcgtactttagcgcagatattgcgcatgacatgaaccaaacagcgttgaaaatgagctttaggataagtcctggccaaggctgttttcatgccaacaacaccatcagaaagaaaaagctcaacttgctttaagcctcgggatttcatgttttgaagcatatctgtccagacttcaatgttctcgctaggcgcaatgcagtagtcaatgacctccttgtgcccattaggcttgatgccaatggcaatatagactgcttcacgctcaaatgtttctcggcgcaaaggaaggtatgtcgcatccaaatagacgcagaaaaacttgtcgcttagcttgcgtttgtggtaagcctcaacctttggaatcatctgcttggaaatatttgatacctgagctggactgtaatggctgccatacatcttttcaattagatcggctatttccctggtggtcacgcccttggagtaaagcttgataatcatgctttccaagatatccgagtgctgcttgtagtcaggcagcgtgtgctgatgaaattgaccgttgcgatcccgaggcacttgcacttcaattgggccaaattgcgtatcaactttgcggaaataagcaccatttctagagttgccagtattccagccatttctggcatagggatcatagcccagaaaggcagtcaattcagcttctaacaagttattaacagcctgttgtagctctttgcgcaataaatcatttattttgtctggattgaatagagcttgagcaaaatctttggtaaaatcattcatgaaggagttcttctttctgtatgtgtttttttgttcaaaccaatcatacgagaaaggaactcctttttctaatgtttaaagaaataaatttaaggaatcattcatccttacacaaactattttacagtctcaaaatttcatttccaaatcgttattatttttaaaatagaaaactagtgaaaaagataaactataaatagttcttgggctaataagattctgagtattaccaaagaagtacacatcatcgtaataccaaacttcatctccagataaaatttttgaaaagtacatcgataatctctttttatagttatctgtaaaaatatccactcctgtaagatcgtaataagcattacaataaatggctgcttttaaaaaagttcgtttatcgaaactgtcattttcaacttctgataacaattttttagattgcgtttttaagtaattaatatcattactttcatatgcttttgaaacttctaaagttatattttttagataattcgaaatattattattaaagaaatctattttttggacatgaattacttcgagtagtttgaatactttttcaatatctaaacctgcttcgcctctttcccatctttctaattttgaacgagaaatacctactgcttccgcagctttactacttgaaattttggttgcctttcttaattttctaaattttctaccatatgtttctttcataacccactcctagttacgttcacaaataccttcaaaataatgatccagataaaggactagttttacctccttaatgatgccttaatgcaataaaaaatcaaactcataaatattacctaaattttcatttagcgctactaaaaaagcctaataccatcatcaagggtattaggtctttattacctaggaaatactaacgtacagtttccaaacaatatgattttttatgacagtttgggcaacgcaattttctagtatgtggcgtgtgtgccgcaaacataaagcttttaagttctggaacaaatttgtaatcgcaattaggacaaatatatgccactttttgataataatttttaagtaacacgaatgacattgcaatcaagcttactactaaaatagctaccgaaatataggctgcagtgttcatcttattgatgatacagtacgcaataaatgccataccgaccaattcaacagtgatttctactgctgacaatttccacattgaacgtgttacctctttgtatctagtttcattattcatgattttcgtaatgtcagtaacttccgcaatattattgggtttacttagaaccttttgtagttggataattttcttgttttgctcttctaatttttgcgtttctgctttatttctttttagttgatcttcaagcaaaagatcgattaatttatcaccatttttatcttctagtattttttgaatatcctttaacgaaaagccaagctcctttaaaaagatgattaattttaattgttttacctgctcatcagaatataaacgatagccactttcactaactcgactgggtttgaccaaacctttttgatcatagtaacgaatggttctagtggttatgtttaacttctttgctagatctccgattgtgtattctgacattactttctcacctcaaaacttaaatatacgggtttacgctacgtcagagtcaagaataagctaaattttccgtaaaaaacttcaaaaagcaaatattttgctcttttcctattgaaattattaacattaactgtataattttaagtgaatgttcactttatacaaatttcggaggactaaatgaacgcaatcagtaatttctttcatttaaaggagaacaatacctcctttaagaccgagcttttagccggtttgactacttttgtaagtatgtcatacattctgttcgttaacccaaacgtcctaggtgccagcggtatggataaaggtgctctattcaccgttactgcattgtcggctgcctttacctgtatcgtaatggggcttatcgctaactacccaattgcttccgcaccaactttgggcttaaacgccttctttacctatactgtttgtttaggcatgaaggttaagtggcaaactgctttagcagctgttttcgttgcatcaattctgttcattttgttaactgtctttaaggtacgtgaaatgatcattgatgccatccctgccgatattaaatatgctatttccgcaggtatcggcttattcatcgcctttatcggtttgcaaggtggtaagttgattcaaaacagtgattctaccttagttactattggtagtctcaacaaccctactgtttggatcactatctttggtttaatcattactattttcttaatgattgccagagttccaggtgccatcttcatcggaatgatcgccgctgctgtttttggcatagtgactggtcaaattcccatgcctaaaggcgttatctcttcagttccaagcattgctccaacttttggtcaagcagtcttccatattggcgatattaataccgttcaaatgtggatcgttgtctttacattcttacttgttactttctttgataccactggtaccttaattggtttggttcaacaagcaggtctgatgaaggacaacaagatgccacgtgctggtgaagctctagcagctgattccagtggtatgttggtcggttctgttcttggtacctcacctgtcggtgcctttgttgaatcaagtgccgggatcgctgttggtgggcgtaccggtttaactgccgtttgggttggtattttcttccttatttcaactatcttcagtccaattttgagtgttttcactacccaagttacggcaccagctttaattattgttggagtattaatggccgaaaacttggcacacgttcactggactaatcttgaaattgccatcccatgtttcttaatcgcattgggaatgcctcttacatactctatttcagacggacttggctggggtttgattgtctaccctgtatcaatgatcgcagccaagcgtttcaaagaaatcacgccaatgatgtggattttgtttattgttttcgtaatctacttcgttgttttaaatgtaaaataattctatcttataacccccttatcttacttttacattaatatataccctcacgcgtggtgctagttaaatcgttctagacaataagccaaattataagctaaaattgcaatttccaaccggctttgaaagcctatcagactacgtgctcgattgttctcggcattgtaataggtcagaagcgaaaagtcgctttcaattgttctgcgaatagccatcaattgatgatcattgtgctttttagctcctgtcatatttttacgatatggtgtccaaagttcgtaacccatttgttttagctgttgatgcagttctttgcctaaatagccttcgtcgccaagaagatagtaattagatggatgggtattttctatcagttcaactgtctccctggcatcatgaactgatgcctttgttacgacataatcaagaatgtaaccgtcatcgctaacaatggcatgaactttgaaaccatagaagtaaattttcttggtggccttataaccaatgttggcataaccgcgaaaaattttagcacgatagtttcgaattggttggcaaacaggtaccggaaagctgtcaatgatcaagaactgtccattcaggtcaacctttttattcatttcttgccgtatctgataaatcaattgcaatagctgacgtgaacgccgattaaaacgtgagtgtgataaacaattgaaacattcacagaatcttctttgtgattcaattcctgtcttagcttgccagataagtaaagccaaaatcagactgtccgtagttttaatttgatcaatatttcgccgatgagtaaactcagccggtgcatacaaacgataccagtgccgacaaattatcactaaatctttaaaactaacttgtaaatggtggctaaaacgcttaagcttaaggcagttcaatcagatcagactcttttctattattactatttacaagtcgagtctaacaagattggacttttttattaactaaaacgatttaactagcaccacgcgtataccctcatctaaccaagtagcatgtctacttggtttttatgctaaaaagatgtctgttaatagtatggatgatgacagcagattctattagatgatataataatcaaagaaaggctgtgactaaaatgaaatcatataaaaaaattcaagctaatgttgactcctcactagcacttcaagcagaaggaatttttcaagatatagggctcaataccactaccgcaataaatgtgttcttaaagaaagttgtggcaactggtggtatcccatttgaattaaaagaaactcctgaacaaaaagcctcaagagaattaattcaaagcatctcaaaaattccccacaaagaagctaaaaccaaaaaggaaattgaggattggctagatgaggactaatgatattgtagatatttatgttgcttacattgataagcctggaggaaaaaataggcctgtattaataattaaattactaaacagtaaagcttggctgctaaaaatcacttcaaaatataaagaaaaaagtgaaaatatccgaaagcattactttcccatttttgactggaaaaaatataatttagataaaccatcatacattgatactaaaaattatttaatagttactattagtgatttaaatatcgaaaaataccgaggccatttctcaatagcagatttacgcaaattaaaagattttattgacgaaaattcaaactaagaattaaactatatgttttagttcctaaacacaatctcaaatatgagattgtgtttttatttatccaaatggcatcttttgataatcatttgacgccttatgatgttcggattcttctaaattgccgctatactattttcaacaaatcgagttatgaaagatttatttaggaggaattcattatgacaactcaagaaggaaaaactgctttaattactggttcatacggtgggcttggtacccaattcgttaacattcatgcttcacacgggggtgacctaatcctagttggtcgcaatgctaagaaattagccgatcaacaaaaagaagcccgtagaaagtacaacgtaacggcgcatattatcgatgttgatctctcacaaccagatgctgcgcaaaagatctatgatacttgcaaaaagaacggttggactattgactacttaatcaacaatgctggctttggtggtcaaggcgaattcattaaaagaagtatggaacaagacatgtccatgatcgccgttaacattgaaacgcctactcgtttaactaaattatttttacctgacttcgtaaaacgcggccgttatgcctggcccacttcaagccgtttactacgctactaaagcatacgttacaagctggtcaaatgcgttatggcgtgaagtacaaggcacaggcgttacggtaagctgcttaatgcctagcgctatgcaaaccggttttatcagtcgtggtgatttgagttcaactcaattattcgcccatgcggttagtccataaggtgttgcaaaagctgggtatgaagaaatgattgaaggcaagcttaacattaccgctggtttaactgcagcccaaaaaccattcatgaaattggaaccaatgttacctaagaagatgctcatgaacaatgtttataagatgcaagaacaaggtagtagaaagtaatcaacttatcttataatatggatcaaaaggatggtatttgaatgaatcactttattttagatggtcgctatgaagacctactctcttttaacgttgaagaagcacttaaaaaagccaatattcctgaagattgtttcaaaaaaccccatccttcaatgagtgaacaacaatactacaattttatggcggctattggtgatcagattagtgatccattcactccaattgaaattgcaactacaaatccaattgaatctttctctccaccaatttttgcggcatatagtagccgtaacggagatatttttatcaagcgtctagccaaatataaaaagctgattggcccattatcttttaaaattgatgaggatagcaagcagctctctattaccctaactccaagtaatcagcaatattccctaccctcttttctagttttatcagaatttgcatttttagtgggacttttgcgcaagacgaccaaagaagctatttccccgctgaagatcacaatgacatcccccgtcaatgatgagcaggtcattaacttctttggctgcaaaatcgaatcgggtaaacgcaacaccatcacttttgccaaaaaagacttgcaggtcaattttattagttataactaagcaatgtgggattatttcaagcctgaattaactaaacgcttatctgaattatccgttgatgattcaactagtgctagagtacgtagcatattgaccgaattacttcctaatggtgaatttacaattgacgatgtagctaaaaagttaggttattctaaacagactttacagagaaagttgagtagcgaaaacactacttttcaaaaacaactgaactccacccgagaagttttagcgctaaattatttacaaaacaccgatatgacaactagcgatattgcttaccttctaggctatcaggaatttaattcgttcttacgtgccttcagcatctggaaaggcataagcattagcgaatatcgtgaaaaaatgaataaataataaaaagcagatatattttctgtttttttactttataaaggaaataatatgagatttttgctataatttactttataaaggaaataatatgaaaattgctaaaaatttactttatgaaggaaataatatgcagttaaatttaattaaccgcccacagtatttaaatcaattacttcaatttcaaaatacagaattcatcaaagtactgacgggagtacgaagatcaggcaaatcttatattttaatgctttatcgtgaatatttactcaaacacaacataaatgaacatcaaatcatttatatttcttttgaagactttgataatatagatctttatgaacctaaaaagctttattcatacttaaaagaacgaattattagtgaccaaagaatgtacattctacttgatgaaatccaatatgtatcagattggcaaaaagtagtaaatagccttcgacttaatcctctacttgatatcacaattactggcagtaattccaatctattaagtggagaattagcaaccttactatcaggaagatatgtagaaatacatgtttatcctctttcttttaaagaaatgctagattttaaacatatttctgaaccatcagagcgtcagattgataacttatatgatgaatacattaaatatggtggtttccccgcggtagtgttagcaaaagaagaattaaaacaaactattctttctggaatttacaataccattattgtcaatgatatcggctacaaaaatggattaagagaaccagaattagttgcattagtagctaaatatctagcagattcgattggtcaattaattaatccgaacaagattgtaaatacactaaaatcagcaaattttgatatctcttataacgctgtgcagcgttaccttaaatattttgaagaagcatatcttttttataaatctagtcgttatgatattagagggagaaagattctttctactcaaggtaagtattacattgtagatactggtttgcgtacccaagctttaggagaaagaaataatgaccgcggtagtgttttagaaaatatagtttatgtcgaattacttcgccggggctacacagttcaaattggtaaattagataataaagaaattgatttcatcgttttcaaggtaaatgataaacaatatattcaagtaacctaccagcttccagaaaattctactagagaaactgataatttacttcaaattccaaataactacaaaaaaatagtcatcactggccgatatgaaaatgaagaaatgatttccggtattccaataatcaatattaaagattggttattaagctctaaaaactgatcaaaagaaactgtcaaatcttttgtgtaaatagatctttctcgtaaattgattttttaattatttatttaatcaaagtaggattctaaggtgtcctgaacctgaccaaagcctttatgaattcgattgaaataacggtcattgtagctcattgcctgaatgccaataaaagcatcaagcgactgttcagttggaaactctgccttaggcttagctttgcgcttgatcacattgttaaatgattcaatcatgttagtcgaataaattgaagctctgatctgcttgggatagttataaaagaccagcagatctggttctatgtctttcaagcttctgataacatggctgtaaaccttgccccatttggtatagaagtcatgcaggacagctgtggcttcttctttgtttgtctgttgatgcacctgtttgaattcgttcatgatcttttcacgatcgtcgacgcgtactttagcgcagatattgcgcatgacatgaaccaaacagcgttgaaaatgagctttaggataagtcctggccaaggctgttttcatgccaacaacaccatcagaaagaaaaagctcaacttgctttaagcctcgggatttcatgttttgaagcatatctgtccagacttcaatgttctcgctaggtgcaatgcagtagtcaatgacctccttgtgcccattaggcttgatgccaatggcaatatagactgcttcacgctcaaatgtttctcggcgcaaaggaaggtatgtcgcatccaaatagacgcagaaaaacttgtcgcttagcttgcgtttgtggtaagcctcaacctttggaatcatctgcttggaaatatttgatacctgagctggactgtaatggctgccatacatcttttcaattagatcggctatttccctggtggtcacgcccttggagtaaagcttgataatcatgctttccaagatatccgagtgctgcttgtagtcaggcagcgtgtgctgatgaaattgaccgttgcgatcccgaggcacttgcacttcaattgggccaaattgcgtatcaactttgcggaaataagcaccatttctagagttgccagtattccagccatttctggcatagggatcatagcccagaaaggcagtcaattcagcttctaacaagttattaacagcctgttgtagctctttgcacaataaatcatttattttgtctggattgaatagagcttgagcaaaatctttggtaaaatcattcatgaaggagttcttctttctgtatgtgtttttttgttcaaaccaatcatacgagaaaggaactcctttttctaatgtttaaagaaataaatttaaggaatcattcatccttacacaaactattttacagtctcgatcaaaataggatcgactaactcatgtcgatcctatttttaaattaaattatgttttttacaataagtaaaaattccgtcatcttgcacgctgccacagatgtcatcagcaatttccttcacatcgtctgttgcgttccccattgcaacgccgtgaccaacagtctttaacatttcaatatcgttgccgccatcaccaaaggctattgcttcgctcacagggatttgataataatctaacactttttcaattgctacacccttactaccagtagctggaataatatctgctgctctatcccaccaagctgttaccttagcattttgcgtattagctacaagtccgtcataatctttttcacgacagcctaccattatttgataaaccgtatcctgatcgacaaccacatcaaaatctggcgccactctcaaatccgttccaccaatagcaaagtattcctttaaatcctcatcaacaccattagctgcaatccgtgttttggtagctacagctaacggccgatttattttctgagcattttgaatcatatgcaagacatctccttgccttaacggattatcaaaaacaatgtcttgatcgttatagcagtaagaaccattaaaagttaaatatgcatcaaaatctacacccaacttaggcagttgcactggtggtctgcctgatgcaatacaaatcataatgccgttgtcttgtaaagcatgcagtgtctctagcattttaggtgtaattgattttttcttttcaattaaagtaccatctatatcaaaaaatattatcttaggtttgctcattatttttaccttctaaagaattttctactaattattatactttaaccgatatttcccaggaaatattaaaattgagctctcttcctcaacatctgtgctaaactagatacaattagtttctttaaaagttaatagttacggaggaatttttaaatgcagacattggaaaaagtctttcatttacaagatgctcataccactgttaaacgtgagttaatcgctgctttaaccacttttgtcagtctctcctacatcttattcgttaacccaaacattttgcacgcagctggtatccctaaaggtgccgcttttactgtaacagctcttgccacagcagttgggtgttttttaatgggttttattgctaattatccgattgccttagctccaaccttaggtagcggtgcctttttcgcttataacgtatgtgttgggatgcatatttcttgggaaacagctttggctgcagtccttgttgcttcagttttattcattttaattactgtctttaaattacgcgaattagtggttaatgccattccacaagatatgaagtatgctatttcagcaggaattgggttattcatcgcttttattggcttaaaaaatggtcaattaattgttaacagcgattcaactttagttactctgggaaaatttagtactccagcagtttggatcacattatttggcttaattttgactgttgtattaatggcattaaacgtgcctggttctatctttattggaatgattgttactgccatcttcggtatgatcattggtcaaattccattaccacataacatcgtttctggtgccccaagtattgcaccaaccttcggccaagcggtttttcacattaaagatattaatacagctcaactttggatggttgtactaactttcttattagttaccttctttgatactgctggtactttaattggaatgactgaacaagccggtatggttgacaaggatggcaagattccacggatcggtcgtgcttttttggctgattcaactgctatggttgaaggtgcagtctttggtactgctccacttggaacttctgttgaatcaagtgccggaattgccatgggtggtcgtactggtttgactgctatctttgttggtattttcttcattatcagtatgattttcagcccattgttacaagtaattccaactactgtaacggctcctgctttaattatcgttggtgtactgatggccagcaacttaaagaaaatcgattgggaaaagttcgaaattgcctttcctgcttttcttaccgttgtagggatgccactgacttactcaatttcagatggtttggcattaggcttgattgcctacccaattaccatgattgcttctaagcgttataaggaagttagtcctatgatgtatatcctgttcgtagtatttatcatctttttcttagttacgaatttataaaaagaatgctaaagataagcagtttgaagctgcttattttttattgacttgatttttattttgtactactgtaataaatatataagacagtttttatgggagaagaaaaatgagactgtaaaatagtttgtgtaaggatgaatgattccttaaatttatttctttaaacattagaaaaaggagtacgcgtggtgctagttaaatcgttctagacaataagccaaattataagctaaaattgcaatttccaaccggctttgaaagcctatcagactacgtgctcgattgttctcggcattgtaataggtcagaagcgaaaagtcgctttcaattgttctgcgaatagccatcaattgatgatcattgtgctttttagctcctgtcatatttttacgatatggtgtccaaagttcgtaacccatttgttttagctgttgatgcagttctttgcctaaatagccttcgtcgccaagaagatagtaattagatggatgggtattttctatcagttcaactgtctccctggcatcatgaactgatgcctttgttacgacataatcaagaatgtaaccgtcatcgctaacaatggcatgaactttgaaaccatagaagtaaattttcttggtggccttataaccaatgttggcataaccgcgaaaaattttagcacgatagtttcgaattggttggcaaacaggtaccggaaagctgtcaatgatcaagaactgtccattcaggtcaacctttttattcatttcttgccgtatctgataaatcaattgcaatagctgacgtgaacgccgattaaaacgtgagtgtgataaacaattgaaacattcacagaatcttctttgtgattcaattcctgtcttagcttgccagataagtaaagccaaaatcagactgtccgtagttttaatttgatcaatatttcgccgatgagtaaactcagccggtgcatacaaacgataccagtgccgacaaattatcactaaatctttaaaactaacttgtaaatggtggctaaaacgcttaagcttaaggcagttcaatcagatcagactcttttctattattactatttacaagtcgagtctaacaagattggacttttttattaactaaaacgatttaactagcaccacgcgtaaaggagttcctttctcgtatgattggtttgaacaaaaaacacatacagaaagaagaactccttcatgaatgattttaccaaaaatatggctcaagcactattcgatcaagacaaagttaatgattttttgcgcaaggaaattcaaactgcagttaatcaattgcttaaagttgaattgactgcctttctgggctatgatccctatgccagaaatggctggaatactggcaactctagaaatggtgcttatttccgcaaagttgatacgcaatttggcccaattgaagtgcaagtgcctcgggatcgcaacggtcaatttcatcagcacacgctgcctgactacaagcagcactcggatatcttggaaagcatgattatcaagctttactccaagggcgtgaccaccagggaaatagccgatctaattgaaaagatgtatggcagccattacagtccagctcaggtatcaaatatttccaagcagatgattccaaaggttgaggcttaccacaaacgcaagctaagcgacaagtttttctgcgtctatttggatgcgacataccttcctttgcgccgagaaacatttgagcgtgaagcagtctatattgccattggcatcaagcctaatgggcacaaggaggtcattgactactgcattgcgcctagcgagaacattgaagtctggacagatatgcttcaaaacatgaaatcccgaggcttaaagcaagttgagctttttctttctgatggtgttgttggcatgaaaacagccttggccaggacttatcctaaagctcattttcaacgctgtttggttcatgtcatgcgcaatatctgcgctaaagtacgcgtcgacgatcgtgaaaagatcatgaacgaattcaaacaggtgcatcaacagacaaacaaagaagaagccacagctgtcctgcatgacttctataccaaatggggcaaggtttacagccatgttatcagaagcttgaaagacatagaaccagatctgctggtcttttataactatcccaagcagatcagagcttcaatttattcgactaacatgattgaatcatttaacaatgtgatcaagcgcaaagctaagcctaaggcagagtttccaaatgaacagtcgcttgatacttttattggcattcaagcaatgagctacaacgaacgctatttcaatcgaatccacaaaggctttggtcaggttcaggataccttagaatcctactttgattaaataaaagattaaaaaatcaatttacgagaaagaactatttacacaaaagatttgacagtttcagaaaaatgaaaatcaaaaaagtactactgaccacgtctttactcacgattagtttgattactctatcgggatgtagtttccacctgtttaccaacaagaattccggtcctacaatcaaacgaactttgtcctctaagaaattcaattcacttaaggtagccagtgacattactgatgttgaattacatgcaagtaatcaatacaaagttatctatcatgggctcaagcgtttcaaacctagcgttaatgtgaaaaatggtcagttaaagatcactcaaactagtaatggtgtttcttataacatcaaagaaggcaatacagtggcaatctacctacctgccaaagaattacaaaatatcaatattaatctttctgatggcgatatcgatgctgatggcaaggttcaagcaaaaaatgtcaaacttcacagtgacgatggtgatgtcaactttgacgatttaagaattagctctggcaaaattacctcagatgacggcgatatttcagtttctaatctacttactagaaaaggcgccacagttgaatcagatgatggtgacattcgtattagaaagagcaatgccagtggttaccgcctaacttctgacgacggtgacgtcacattcaagggagatacttctgataatgatgacggtggttcttactacaaaaatactaagagttctaacctgctctctgctcacagtgatgacggcgacgtcaacgttaactaaatttcgtcataaggcgataagtttcacatgaaacaaaaaatcaatgcatcattgataatgcattgattttttacttttttcctcattcatagcataaacacgactttacaagattatttaagtttctattgaaatagacataattttaatacgaaaaagataagactaaattctacttttccattaaaaaatatttaccaattttccattttctaagtcaaaatgatgcgtaaatttcttcatcgtcgttggtgaaatatggtggtcaatttcaattactgttaatggcgaattcaaaaagacattatgaatttgctcagcagtttgcggatcaagtgaagcagttccttcatcaactactaaaatttctctttggaatagaaaggcacgcgctaattcaattctttttctttccccacctgaaagattatgcccatttttttcaattacggtatctaagccatgtttttgaacgtaattagttaatcatgcttgttgaaccgcagccatgatttgtttttgatcaaattgtttaccaagagttaaattaaatcgtaaagtctcattgaaaatttgcgaagtttgttgaacttcactaaaaatttgcgtttcaacagactgattattaaccaaaactcttcccttctgcggagataatttacccattaacaccttaagcaaagtagatttaccttcaccggactttccagtcaacagaattttatcccctctattaacgcataaactcacatcattaagcactggactatcagcttgatagccaaaagttacattgtccacatctaattgctcaaatttgattggagcctcatcttgcttagttgttaaaggtttgaaagacaacaacttagcggtcattggtttagtggcggcaatctgattacgaatactattaatactaaagaaactatttacaatccaagcactagagtattgcacggccacaaaagaagccaaagcaacgtgtccttgaattaccataataattccgactccaatcggtaagaagtctagtgagtaagctaataaattaacgtaaaaatcactcttagcaattgtatcgtcacgttcacgtttattctcaacagaatttttgattactttactactcttttttacaaatagagataatacattgtaatttaaaaccgtattgatatttttgagtaaatccgacataaatgttacataactacctgttgatttactccaatcggatgactgcttggctgttttcttgctaaacaaactaggaataaagcttgaaagacttgcaaaagcaacgaagactaatgtcaagactacactatttatcagcgcaatagtaacgatcccaacgattttaaccacagtagatactagtgaaaataactgtctaaagtacttttcttcaatcaagttaagatcattattaatgaaagaaattcgattagaaatttctttttctcctgtttttacaaaatccgtttgcatcaaatgctcacgaaccttttgattaaatagtgctacgttacgattaattactcaattatttaagtattctacaattacaagtaagatttgtaacactgtaattacgataatcattctcaccgtatttggaatacttttccttgtaactaacgcaaagatttcggagtatgaccatgtgctaaaaggcaaagaagtccgcttaaacatgacagaataatactgagcgaaaaccatttgaggtcaataaactttttcataaatgaatctccctttcaattaagttggattcattatctgctttagttcacgataaaaatagctttctgcaaaagtgatcttcaatctgcatatatgcagattattctggaagaatagacagaatattttctaaattacttgccttgatcaatttcttaatagctaatacctgctctgtatctccagcaaaatagcattgataaaaatgaccaatgattttatataagactaaagatggcgtttgacttaattgcccaagtaaataaataggctctttattatcttttacaaatttattttcagcacaagtatataaataattcacacaaatagtggcaattgttgtttgcattttttctgtctgctcagacattttatcattataagtagtgaaaattttttgaaagaaaaaagcaaaatcgtcatgagtaaagatagaggtaccaaaattggctaacaaatctaaactaaatttatcttgaagccaattgtcgcctgcaaacaagcgttgcagtactatatttttatctttgacatcaaatttacgttttctttctagcaaggtaagaatcaacttagctttgattttcagaagatcatgatgcggcagttgttgaatttctgttaccaattttctaacttggttaaagtcttgattataataagcagtctgtaattgatcacctaaattgttttcatcgtcagcttgtgcgactgaattttgcttaaagaattcatcaaatgaaattttatttttctgcaaaattgccattaagtccttagctgatatttcatgcaatccgcgctcaatcttagaataatgggcaggtgataaaattcctgttacaaattgttcttgcgtcagtccccgcgattggcgcgctttttttaatgctgtgttaatttccatagctgtttttatttcaatttacggtcccttttagatacaaaccaaattgtcccatcagaagttgcccagtgtccatcagaagttttatgaaatttcagcgtcagtttcttactgtgtagtgtccagctatttttaccttccattgtgacacggacccggcctaatttttctgaatttattttgttattgtagtctttgggatcatatgaattatgcccatatactttataaattgcttttgctgccgcagtatttggcttaatgtatttataagtaccagatgcatcagtcttaaaaactgggctggatgcatcgatttgaccactatttttccccagagctatgttcaccaacatgccaagatgattttccattacagaatctgtttgatggggatcataggttgtaagatttttattagcaaactgttctggaatagtttgctgattgcgataaaacaaccagccaccgactgccagaactacgactactacaacagttatgattgtagctttctttttcataaaggatcacctgttatctatcagcttttttctgaaaagtaattaatccgtgtgaaactaatctaacagttccgccataataaactacccaacgtactttgccattactgtactcttcatacattctctcccgctgaagatatccattatatgtaccatcattataaggaatttccatcggagtatctacagcaccatcataagcgccataacgcgtcttatgccatgggcctgttctcttaactccatgaacttttttagttaacggtagtttttgaacgttttgaactgaatctgtactagattccgcagcagatacaacagcagtattagtggttgcaaacagagcagttgctgagaataacactaaagttgcttttcttaatttcatatctaacaccttatacctttcttttattgtttattttcattacctagttgttcattatcattgacaacaaaatttgtcatcattttctttttacttgctaatgtaggaattgggtagcttttaagtttagtattatacaaatagccaccgtacataattcctgttggattatgccccattggaacagtgtacatcttttccagatatcctctaaatacctcattgcctcttcttacagtgtaataaacataagtaccctgatcatgatagtattgacgttgataccagatatgttcaacaaatccttttgattcagtgctttgtgttgcagcttgtacatggtttgattgaaccaaagctgaagttgaaactgatactagtgataaagctaatgctgctttagctgttaaagttaaaattttcttatttcttttcataactttaacctactctttttttcttttcttgctttaattactacctaatccagacggaataggaacccatggacccatatttttctctcctttcttatttatttttcattaattttactttcactactaagaactgttcagaaattgtcaaagatgacaattttctacaataaaattcttaatcaaatgagacattccattacttttcataaattcaataatctgatctacttcttcatttttgccatcaaaacaataatggtaataattggcaactattttagcaaaagcattacgtggaatttctggcaatttagaaatgaaatcgtaaattagatttaaatcaattttccttctttgtacgtatacattagccaaataattaatagctattgctgacattatttcttgtagctgaccagacagattagatacattatggcgatacgttctaaatattgaattaatcaaaaagtccatatcttctggggcatatatcatcatagtcattgcaaaaatttgtagagtagattcactccactcatcagaatcaaagacaatttgtctaacttgtcgtttaatattctcagatatttgatcaatttgtttctttaaagatgctattgaaaataccactaaagcataaagattaaatatattctgactttgatttttatattttccaatttcaattttcaaatcttcaagtcgttcgatctgctgatgataatatgcatcttctaattgcttttgccagatcaaatttttgtgagcaagatcattttcactatcttcattttctattcgctctaaaaatatagaagcttgcaatccatgttgctttaacaaatcaattaaatcctgagtctgaatatcatttaatccacgttcaatttttgaatagtaagatgttgataacacatcccccgccatttcagtttgtgataatttcatactttttcttgtttgttttaatgcttcaccaattgtcatatctttccctccctcgtattatcatatttttcattattgtataatgttttgttaattttgcaatagtttgtaaaacaaaagcattatttttatttttcaatcttttatgtttacaaatgtaaacttagcaagtagaataaaaaatgtgaagagatgaaaataaattatttaatttggaggttacggtcatggatgtaactaaaatcattatccttgttgtcgcaatcgccttgatcggctttatcctttggtggttcttcggcaaacatgacgaagctatcggtaaagcaagtgttaatcaaggcacacaagaagctaacatcgtcgttaacggcggttactctccttctaccattgttttaaaacaaggcgtaccagctaaggtgaattttgatatgcaagactctaccgcctgcttatcgcacgttgtttttgaacaacttggcgttaacaaagatttaaccaagcaaaaaatcactacaattaatatcccgactgataaaaaaggcacttataacttcgcctgcggaatggatatgtttcatggaaagattgaggtcaaataatgagtattttttcaaagaatcaaatcaaaaaagttgtcgttaatgcagataatcacggttacaagccagatgtagttaccttcaagcaaggcaagcccgcacaattgaaatttatcccatcagataatatgggctgcatgaatgaaattgtatctaaagacctgggcttcgatcataagctcgatggtcaaaaagaagttgtggtagacatccctaccgaccacgcaggaacttataattacgcatgtggcatggacatgtttcatggaaagatcgtagttaaataatgaaattatctaatattcagcgtttctggatctcctttgtactctccatcccgatgctcattcagatgattgccatgccatttcactggatgatgccaggatacaactggattgcccttattacgacaaccattatcatggcaatctcagctgcaccatattgtaagagtgcttggggcgccttcaaaaagcataacgctaacatgaatacgctagtggccgtcggtactgctgtggcttacttttacagcatctacgctatgttcactggccgcgaagtttacttcgaaagtgctgcttatgtaacggtctttgttctacttggggatgccatggaagaaaaaatgcacagcaacgcttccaacgcactagccaagttagtcgacctacaagctaaagacgcagcagttttacgttacggtgaatttgtcaaagttccactcgaacaagttaagccgggtgatacaattcgcgtaaagccgggtgaaaagattccggttgatggtgtcatcactgatggctcaactaccatcgacgaatcaatggtcactggtgaaagtatgccggttactaaaaagaaaggcgacaatgtcgttggctcaacgattaacaccaatggtactttcacttttaaggctaccaaggtcggtagcgatacgatgcttgctcagatcgttgatttagttaaaaaggcccaaaccagtcatgctccaattcagaacttgaccgacaaaatttctaatatctttgtcccagtcgttttaattattgcaattattaccttcgtaatttggtatgttttcttaggcgcaacattggttaatgctatgctcttcgccgtttcagtagtcgtaattgcttgtccatgtgcactaggtttagcgacaccaactgctttaatggttggtactgcccgtagcgctaaaatgggcgttttaatcaagaacggtgaagttcttgaagaagttagcgacattgataccgttgtgtttgataagactggtacaattaccgttggtaagccacaagttactaatgttgtaggtgataaaaacaaggtcttaactattgcagctagtttggaagaaaattctgagcacccactagcaaccgctgtagttaaagctgctaaagaagcaaagactgaaattaagtctatacaaaactttgcagctattgaaggccgcggagttaaggcaaactatggcaatcaagaagcttttgttggtagcgatcgtttattagaagatatttctatttcccaggaaatgaaagatcaggctctccaacttcaaaaagaagcaaaaactgtagtctatgttggcctaggtaatgacatcattggcttaattgccattcaagatgtacctaaagcaagttctaagcaagcaattgcggaacttaaaaagcgtggtttaaagacggtgatgcttaccggtgacaatcaaaatgttgctgaagctattggccgtgaagtcggaatcgaccaagtaatcgccggtgttttaccaactgaaaaagccgctgagattaagaaattgcaggatgaaggcaataaagtagcctttgttggtgacgggattaacgacgcacctgcattgtctacagctgatgtcggaattgctatgggatcaggtaccgatattgctattgaatctggcggtatcgtccttgtacagaatgacttaatgggcgtagttagagcgcttgagatttctaagaagacctttaacagaattaaattaaacctcttctgggctctgatttacaacacgatcggcattcccattgctgcaggtttattcatggcctttggcgtgcagcttagtcctgaacttgcaggcttagctatggccttctcttctgtttctgttgtaactagttcacttttattgaataaaacaaaaattgctggtgaaacagctcaagtttcaaagtaaaataattctccgaccggatattttaatccggttttctttttgtaaatttttcaatttgcgacttaaagtttcagcagtaatacccaaatatgatgctaagtctttcttttttaactttaattccacatttttactcccctgtttttgagctaagtcttgcaaataggccattaagcgttcctgagcatccattgaattgcgccgaatagagttagtttcgattgtaaccagctgctcgccaaaattattaagcaaattcaatgctaaatctggcgtctttttcaataacttttgaaaatcacgacgctcaatagaacaaacataagtatcttgtaaagcctgcacaaagttttcctgggcatgttcttgaaaaagattctgctgtccattagcatcgccttgattcagcacacctaatacggtctctttaccgtcttcgttgagattgtaaatcttggcactgccttgatccataaaaagcattccgttcttaccatcacctggttgtcgaataatactgccttttggaaaatattcttggtgcgttgaaattggtactagtttttctaacatttcatttggcaaatttttaaatatggctgctttgcgaatacaagccatgggtgaatgttgcataaaagcctcatttcttgatctaagtcaatttatttttatctgcatcttaatacaatgtatttaacaactcaagcagaaaggaaatattaatcatgactaaatacatcgcacatattgagcctttaaacgctgaaaaaattggtactaaggcacacggtactgccacttttgaagaaaaaggtgatcaactacatattcacgttgagatgtttgatactccagcaaatattgaacactgggaacatttccatggcttcccgaatggtcaaaaagctcatgtaccaactgcagctcaagacgttaaccatgatggctttattgatttaccagaaactgagccggtctcaggaactacaatggtgccacttgatgatgccccagaaaacatgaatattcctcatgatggttatcctgttgccgacagtaatggacattatgaatatgagattgatgtctcattaacaaagctacaaaagaaattcaaagctgcctttggtagcgataaactacaactagacaagcgtgtagtttacgttcatggtgtacctgcagatctggaattacctgatactgtaggtggttgcgtaatgagttatgatgcccatactaccttgccaatcgcagctggtgaaattgaaaaagcttaagttaaaagccattccttgtgaatggctttttgcatcctttcttattttttgatagcatagatatagattatgtaaagtatctaagaaaaggagatgttttataagtaggcttagatcctactcttatggagaataacgaaaaaattatccaagaaaagaaacgcgaaaaatttattaaaactaaaaagaattacaagcgtgcaccactaatgtcagttcacttaagagtgatgatggccgttatcttaggtcaaatcgcctgtggctattccctgggaattagtggtaccgctctttctaatgcagctaaatatatcaacattagtgacttctggactggattaattggggctggtgctttaattggccttgctggtagtcttttggtcggtcgactttctgataaaatcggtcgccgtaaactcttaatgtggaatatgtatatattagctgctttttctttattacatctaataaccgctaattttagcttaacctttatcctccgtattggaattggtttaatgattgctgttgactatactgtagggaatgccttgttaaccgaatggctacctaagggtgaagacagcaagcgccagagtcatttattaatctactggactattggttttattttgtcttacctagctggtagttttatcactggatttgatagttatacttggcaaataatcttagcaacaagtgcagtacctgcactagtaactgctatcttcagaagtcttttcccactccctgcttcaccaggctggctagcaagtaagggtaagattaagacggccaacaaggtcattcgtaagcacatgggacgcaaatggagattacctgcccgctttatgaagcggaataaaaagaaaactcctagaaatatttcctgggcaattttattttccaagcaatatctgcgacgtactctagtaggtgggattttctatgcctgccaagccttctcatttttcggtattagtatcttcttgccaattttattacaaagcatgaatatcactagtggaaatatctcaggaattatctacaatggtgggatgttcattggtgtgctaatcggtacctggatctttaacaaggttagccgccgcttctatcttatcagtaattttctaatctcaggtctgctaatcggcattttagcaatagtacctaacttaaattcaatacttaaattaggtatttttacgttatttgcgattattttatcagctggtttgatcctagattatccttatccgactgaattatttgatctgaaggtacgagcaactggtgtaggtacttgtattacaatcagccgaatcggggctgccgcagggactttcttattgcccgtcttaactaatgtgggtggtgctagcctggcaatgctagtttgtgcgattgttttactctttgcctttatcgtttgcctcatctgggcaccggagacctcaccccaatttatgaaaaaataaaataattaatatgctacacaaaaagtgtctgggaaaaaactaagtctcagatcatgaaaaaagaacgttgaatttttgtttcaacgctctttttgtatacttttagctccagccttgatattattaaatcatcacaaaataaaaacaaaaaggtggaaactaacatgtacaagaattatatcacaggtcaaactgctttaacacttaatctagattttgccattccggccaatcatttggctaatgtcatcagctggtttgtagattcaattccagaagatgttttagtaggcaagactgctaaaacgggccgcccagcctatcatccagccatgatgctcaaaatactgctttttgcttactccagaagagttttttctggcagaaagattgagttgatgctggaagaaaatctgccaatgatgatcttggctgaccagcaaaagatttcatatcatactatcaataattttagatcaagcagccatgccaatgaactgattaaaaagagctttatctacttcactaacctgttagaagatgaaggcttaatcaatgaaggtgctgcttttatcgatggtactaagattgaagctgatgctaaccgctatacatttgtctggcgcaaagcggttgaaaagtatcatgaaaagctgaaaggccaggcagttgaactttatgatgaattgattactaaagaagtagtcaaagaaatggaaaaagaaaaagttcaaactagtcaggggctaaaggaattagctcaagaaactgaagcagaaattaacaagctgactaaagagattgagcaggaaaacaaagccattcctggcggttcacctcgaaaagccaagcgacgtggactaaaaaagattctgcaccggctaagaaaagattatgtgccaagaatgcaaaaatatgaagaagccgaagagatctttgccggacgcaacagttattccaaaacagatcatgacgccacctttatgcatatgaaggaagaccacatgaaaaatggtcaattaaagcctggctacaatattcaagcagtcacgaccgatcaatatgtagttgattatgccatctttcctaatccgacagatttcaaaactttggagccggttttggatcaaatgaccgtgttggacaagtttgacaaaatcgtcgccgatgctggctatggcagtgaatacaattattcgatgctggaggaaaaatatccagacaagaagtactttattccctacactatgtatgaaaaagaacagaccaaaaagtataagaatgatccaactaagctaatcaactggtactacaatgaaaaagatgattattacattgatcatcatggcgtcagattcaatttcaaatattacagccagcgtaaggatcgttctactggtcaggtccgtgattttaaggtttatgaggcagacgagttccagctaacgccagaattggaacaattggctaaaacagctagcggccgccagcgccaagttcgctataatcctaactggcaatatttaaaagaaaaagcaaaagaagttctccaaagcgaagaaggcagacacatctatggcatgagaaaatatgatgtagagccagttttcggacatttgaagaacgtatttggcatgcgcagaacgcacctgcgaggtaaagagaaggtcgaaaccgatatcggaattgcctttatgatgatgaatttgaacaaatattgtcaaagaaggtggctgaagggccgatttttattgttaaaaattttaaagagaacaaaaaaacgatcaagattcttaaaaaaggaaatcttgatcgtttttattcatctggaagctagttttttcccagacacttttcttatttcttatcttttttcttcttgtccttagaatccttatttaataattcttctggatccttatgcttaggcgtcttctttggatctggtacagttgcaaagcgatcaagcatcttctgtaagttattagggttgtcaaaagttaatcccataaaacatcttcctttcgttttctcaattatattaaaatttcaattcaaatgacaataattttaaccctcattatcaataaattgttgcatcttaatcatttctgaaccagccagatcaacactaattaaatcactataatcatgaacactagtatctcctaaaccatattcagttacaatttttaggtcgaagccactatcagagcgatcttcaattaagcctaaacgatcaggataatgataaattgaatcactaattttcactatttgatcttcgggccaattatcaataatttctgctggtgactgaatttcatcccgtaatttaactgaacgctccagcctgtccggatcaaaactgccattatttttttgccattgaactaaaaaattaaagaagagcaagcgctcggaatcttcagtaatatgcgttatatggctcctagcaatcactgcaattgattcaacctgccctaactcattgatgctctcgaataccagattatcatcgtcatacttgagtactttaccaatagcaaaactaccatattgatcatcaaaggtataatcaaaataaatttcaaccagatccaagtcgttagtgaattcttgcttctgtgattgccgcaaatattgggtaaataagcgattatcaatggcattagtatcgacacaaacaatatcgtcaagtggtataacggtggcataatgctctaaagttaattcattgcgttctaaaatacgcacctcttgctgatcaagttgagtaattaagccagtgtaagtagcacctgtattcacctcaaaagttgtaaagggttgcgcgtcagctacgttaatcagtaaatcatgcagattagtaaaatcccaggctaacactgtcttatttaattgctctaagttaaatgaatccttaacttgggtaatcatataatagcgtagattaggcgtatcgtcttcaatcttagctacttgatcttctttaataaagactattccacctaaattaccgccttgatcgactgattcaaaggtaatccagccatgatgttgcgtgataatgcggccaatatagtaagaatttgcatcaactaccgtaatacttgcatccccacctaagttatatttttcttgatcagccttaagcgtgatttgtacaagtttattcaatttttcgccccctcttttttcttccgtgaatttaattgtcgcctaatcattatttttctgcaagaaaaaagaagatggtttagccatcttctaatattgagttaattctgtagaattttggggctaacgaatattacttcttttgtgcagctgcctcagcttctgctgctgtgtttgaaggggttaacgaagtactgtttggatcaaaacgcacatcgcttgcttttacataaccatcagcaaattggacttcaccttgattactatagacagatttaccaactaagtgataaaacagttctgccttattttcacttggtacccagatgtaaagcaacttatttaccttgtatcttccaccttgttttctaacttgatcgcccttgaagtcaatcttgtttccgttagcatcatagatatcagttggcttaataaattgaattagtgattttttagtatgataataattttgaactggaatatctttagcagctttaacattgaaattataaatccaataatcagttcccttaatatgatagattgctaattcgttgtcatcgtcaccatctctaccagtatcagcacgtgtcccttgctctaaacgatccactgtaaacttatcaccttgttttgcgtattttcctgaaggctgaactgcatctttatcaggtacttcaacaaaaagagcagcacgtttatcagttacagtaacagtcgtttcttctgatttagttgtttgagacgaagaagaactagtgttgttatttgtattaacactaattacaggacctaaattataagacttaatgtactgtttattaggtccacctattctaaagtaatgctttccgttcttaaatttgtatgaaccgccataagtcgtgatagtttcacccttatacaatttccaacggttattgtaagaggttctgccagttgaggtacgataaatgtaagtattatgagtaatcttacgtgttacaccatcaatgttggtagcctttatgtattgatccttgccgcttactttatagtaaagcgagccgtcaattttcacagggttgctttcaacagtgacatattgataggcattgtattttacacctgtgctgttaccatccttgtcgtaagctaaagcagtatgcataactgctttagtcgtagcagcttgtacttcattagttgtattagtcaaaacagccaagggtgcaactgtcattaatgtagctgcagaaattaatgcaatcttatttttcttcatcataatcatccttttcaaatctctacactgctattatattctctaaagctaattaaagcattaaaaagaagccaattaagtgaagtggacttctacttttgatattttcttttaatttattttttcaatgccgttgcctcagcttctgctgctgtgtttgaaggggttaatgtcaaacctatattaacaaatttaacatcactagctttaacataggcatcattaccaacttcaatttgatcaacgttacctgtagcatagaacttagtaccaactaaatggtagaataattctgccttgttttcacttggtacccaaatgtatatgagtttatctactttcagatttccaccttgttttacaatttttgcgccattgtggttttgcatagtaccgtcagcattatacacatcagtatccttgacaaatttgatatagccataatgttcgtgatcataatcatgctttactaattttttatcggcagttacatcaatagctaaaagccaattgtctgtaccttttattctatacattccagcttgtgctgcagttgatggaaaatgatcagcaaacggagtaacttctagtttatctacaataaacttcgtaccagctttgagattctttttgattgctttaccttgattatcataaatatttacaccgtaagcattttttacggtaacagttgcttcctcggcattagtattagtagcgttgtttgattcattgctggttaaatttgatgcagtattagtactaataactgggcctaaattatatgatctaatatattgcttacgtggcccacctactctaaagtaacgtttaccgtttttaaatttatatgatccaccatatgtagttacggtttcacctttataaaatttccatttcttactgttggcagtcataccataaggtgtcctttgagtagaagtccggtatatataagcattatgagtaatctttcgggttacaccatcaatattagttactttgatatattcatctttatctgtaactttgtaatattgacttccattgatagttactagttttggatctacatgaacactaccataaacgtaatatttatgaccggtactatttccatctttatcataagctaatgcgttgtgcataatagtcttggttattgaagaatctgcttgtactgtatgagcgctagttgtagtactcaggataggtgccgttcccattaaagctactacagaaattaacatgattttattttttttcattattaaccaccctttgaaaatctctatacttcaattatcttactttgtataaacttagacaacaaaaatagcatcaaatcatattgatttgatgctattaaggctaaaatttacaaatttagtcccaagctaattcataaaccttatttgaaacagttttatttttaccgttaacattagcatggtatgcaacagttaagtaaccgtgattttcatcaataatttggatactttcaacttcactatgttcacctgaaatatctaatccaccaaatgcacttaagtttacattttcccattgagattgatcattacgtgcataaaacggaatttttacaatttccttgtgatagtatgaccatgaaccattacttaaacttggtgatttttgactagtaatataaatattaccagaattatcaagatcataaccttgtacagagtttaaaacagatccatacaaaccatatactgtaaaactagtttcacattgataatttcccatatttacgaaaccattatttccagcctcatctaatgcattattaatgacatttaggtcataaattgaaaagtggcctgttccattattctcaatagtagcaattaaaagcatactataatctggtgaaactgctacttcagcgcgttccatttcatcaccagagcattgatcttcaggattacctgcgcggttcaagtatgctaaacgtgggaattcagtatttgatgaagcatatgatttgtatctaatatctgctcgagcaatttgagaagcccatttattcttgtttttagtaccaacgaaccatttaccagatctacctgaatattcccaagtttgggtgtgtccagctgctgcacctactaaagtaagcacaggggttgtcacgttgccacggaagccacgcaatacatgtgtttctgtctggttatttcttaactgtaaaccataaacatactttgatcctacattacctttttgaactacagctctgtaacctgtattcatatcgaatctatctaaaattctaatatttgttgcatctaacataataaaacctccgaaaaatttaaaaactactacttatcctgagtttgctcattcatctgtttagccacttccgcaaagatgtcctgcacttcttgcctgttcagcttgaagccttttgcttcaaggctgttcactactgcgttgccaacacggttaatcttctgttcgtcagaaagattttctttgtcgtataagcgtacatagcttttcattaagctatctgcagtattgcggaattgctctaagcgtttattcttgaaatgaactctgctcaagatgccaatacctactacgctaattacccataacgccagagtaatcagctcaacgtaatcatgaatatccataattgaatgaatcacctctcttttgatcaaacgatccaagggggctaacgaatgtccattggacttcacctctgtttgataatgttcaacaagacactaatacacttgatttatattagtttttagactaatataaatgtataagaaataaccgaaagctggtaaatgttccgccaagaattttattaacttaggttgttttctttttcatatctcgttgacaatatttactataagttaattaactaattatgtcaataaaaaaagctaaaaaactattattttttcgaacaagtattcttgaaaggcttggtatgattgagttagagcgcacaaaagaattagcaaaaaaatacaaaatgaatctccgtgaagtaaatgacaaggcaggtttaggtagaaattccatctataattggaagaatcaaagaccaggaattgatgcacttaatgcagtcgcagatgtactacatacgtcagccgattatttaagtggtaagacaaacaatcctagcccgtcacctaaaggtgatgaaactggtggtatttctattgatggtgaagtaccatatttctatcatggctacactattccagaagactacctgaacatagttcgtcaacttatggaacgtgatatcaaaaaaggacttattaaacgacatgacaacagcagatcagaataaacaagaactcatagactggttattagcctatgctaaaaaacgtgatattatggttgaattagttgaagtaaatccaacttacccatccatttctttaaagaactatagattcgctgtcattaatactaattggcatcatcaagaagaagtaccattttcaataggtcatgagattggtcacattatgctgactaatggtgaagtagattctcgtcaatatatcacttttacagaacagaattccgaagaaagtccagcagacatcttttcaataaagctaatctataattactcctgcaaaatgggtgattgcttcgaagatacaggtttatttatgcaagcatacgggataccaaatcgagtagctgatgcaactaaagagatatttaagcgagcagcttaaccatcaacttctatattgatttgattactaaaagttttagcattagtttttacactacttaaaatccaattaaacaaaaaatcgctactcaattgagtaacgattttttctatccatccagttcaacgccttgcaagtccttcatcttgctataaaccgcgccacgttgacttgaatcaaactccagaataagcatatctccgccgcgaattacggtttgaccatttggtatgatctcatctccatcgcggtgaattgttcttaccctagtatcaaccggccattgaacctcagaaatggttttatcaaccagtctactgctctcatagaccggcagagccattgtatcagcctgaccagtatagttagccttatggtcactactcttgtccatagcggctgctagaagcccgtagataggcttaccgccaagaagttcatcaactaataacgcaatgaaggccaccacagctaatggcatcaagtgaagtaaggaccctaccatctcagtaattaagataatcgccgtaaatggtgcacgaatgattgctgcaaaatatcctgccattgaaaaaatcactaggttaactactaaacgctgcggtaacaagcctaactgtaccatcatcagtccataagttgcaccaatcaaagcgcccattgtcaaaattggcaggaagataccactaggaagacctgaatcataagcaacaatggagaaaacaattctcatgacataatagaaggctagcatccctacaatgccccaacctgttttagtgattatattcggcaatgccagaattaaccgattacctggaccggtgattaatggccaaaagtaagcaatcgggattaatattgccaaaggaataagtccatgcagccaacgaggtaaaatggtgattttagcatagaccttctttaaactaaataaaccaactttatataaatgacccaataagcctaataaaatccctaagataagcaagtgccagtacaacgaaatcggaaatgaatagttatattgaattgctagggcgtgacgaatgccaaacaagtttgaaacgacaaagtttgaagcaattgcgccagctaaagcattcatccaaactaatggtgaaaagttatggaatacttcttctaagacaaacaaggcaccactcaaaggagcgccaaaagcggcagacaaaccacttgaagcccctgttgcaagcagaattctagtttttaatttgttctgcttgcatccctgagcaacaccttgaccaattgtcgagcccagctgcaatgatggtccttctggtcctaggaatagccctgtgccgataaccaagataccaccgattaatttccgccataaaattggaaaccattgtagtgatagcttcccttgcagttgcaattttacttctggaataccagaaccaccaacatggggatattgtttaacaaaataaccagcaattaccgctaccgcaataaagccaatgataatcgcaataaaccacaacggattctggtgcgctaattgaaacaagtataaccaaaaaccagatgtcttttcgattccaaatctaaataaaccaactactacgccggtacatattccgacaagtagtgcttggagcaacagtttaatattagttctgtttgcctcgtctttcattactttctccctcacaataaaaaaaacgtgtcacaaactattgtacaacaaaaagccagctagaaatgttccaatgtcattaagttaagacattgacaattaagggtgcttttttagagatcgaatcatttggattcgatctctttttttgtataaaataaaggcgaaaagaccagccttttcgcctatcttatatattatatattttaaaccttcaaaattattgccagaaagatggtgttaattatgaaagcccttcataagaatattctagaacgtcttgatcaaattatcaataatactggggatcatattcacgattttattaataatcctcatgcttttaccaggaaacgcactttagatgcagcgacagtccttaaaactacaattaacatgcaaggtcagaatttaaacagtgaactctttagagcttttggcgaagatgcaactaaaaagaacgataaagtagttagtacttctgcctatgttcaacgcaaaagccagctttctcctgcttgttttaaacatattctgactgtttttaatcaaaatctatttaatattcaactttttgatcatcactaccgtttgtttgccattgatggctctgactttaatcaaatctggaatccgaaatcgaataacattgtacaagcttcttctcataaaaagaaaccctattgtcaaattcacgttaatgccttatatgatctattgaataatacctaccaggattgtatttttcagcctaaatcagaaatggatgaacgcaaagcggctgttcaaatgcttaaagctttgaattgtggtccatatattgtaacaatggatcgtggctacactagtttcaatatgattgaaaactgcaatcgcctgcctaactgtcattacataatacgaactaaggctggacaaggcggagttaaagaaataacgacattgcctgatcaagaatgtgatcgtgagatttcctgcctggtaactacttctaactattactacatcacgcataaagccagtgagaatattcaccatgtccagcatcattatcgccaatatattaagtatcgctctaaaaatacccaggatctaagctgggattttggcgagttatgcacaataaaatttcgagcctgcaaatttagaattaatgatgccaaatcaggcaaagaagaatgggaagttgtgctagccaatcttgatcgaaaaaattatccgctaaaaagaattaaagagctttatcatctgcgttggggtattgagacctccttcaagaaattgaagtattctttaggcagtgtacagttccattccaaacaagataaatttattgaaatggaaatttatgcccatatgattatgtttaatgcaatcagtcaaattgatgcacaggcctatattccgcaaaagcattgcaagtatcaatatgccatcaatttcaagcaatcatgcttgattattcagagcatgtatttggcttcttctttaacgcaagattttgaacggatccttattcagatcagctattataccattccaattagaccaggccgcaaggacaagagaaatattaagcccaaatcagctgtatattatttatatcgcgtagcttaaaaaagcagaatctgtgctatgccttatttgttgtacgaaaaaagcaccaatttaaccaattaaatgttaaatcagtgctttaaaagtctaatattaattgtcaatgtcttaacttaatgacattggaaatgttctaactgacttttttgtttcatgtgaaactaattatttttcttcataccattcggtgtggaagacgccttcacgatcatttctaaggtaagtgtgcgcaccgaagtagtcacgttggccttggatcatattagctggcaagtttggattaaagattgattccaaccagttaagagctgcgctcaaagttggagttggcacaccacacttagtagcaaattcaactgacttacgcaaagctggcaagttttccttcatcaaaccgcggaaataatcgtcttggaataggttcattagcttgccgttcttgtcataggctttttcaatatccttaagcattgcggaacgaatgatacaacctgcttcccaatcttgagcaattgacttgtatcttaagtcccaatcataagcttcagcagccattgtcaattgttggaaaccttgagcataggcaacagcttgggctaattgcaatgatttttcgaatacgtcaaccatatcatcaggaatttcaccattgtattcaaacttagttggtttaacgcccttttcaattgtcaagtgtgcttgcttactcatgaaacgtgccattacagcctcggctaccaccgttacaggagcgccaagtgcaacaccatcttcgagcatccagttaccagtacctttgtatgaagcaacgttcaaaatgtgatcgattacgtgatctggcgttaaatcatctttttgtgccaaaacctttgaagtgatttcgctaagatatgcttctaccttaccatgattccatttatcaaaaatttctgacatttcatcatcgctcttgtgagcaacgtcacggagtaagttgtaaacttctgaaaattcctgcataataccgtattcgataccattgtgcaccattttgacatagtgaccagcaccttcaggtcccatgtagtagacacatggcttgccttcagtattcttagcggcaatagcttcaagaattggagcaacttccttataggctggttcatcaccacctggcatcaaagctggaccattcaaggcaccctcttcaccaccggaaacacccataccaataaaatgaatgccgtgcttttccatttcgtggaaacgacggttagtatcgtgataatttgagttaccaccatcgattaaaatatcgcctttatccaaaagcggcagcaatttttgcaaagtttggtccactggatcgcctgccataatttgaatcaaaatcttgcgtggcttttcaagtgagtttacgaactcttcccaggtgtagcaaggctttaatttatcatcttcatattttgcgaaagcatcaacttctggtttgtcgattgagaaaccggaaacggagaagccgtggtttctaacattcaaagcaaggttcttgcccataacagacaaaccgataacgccgaattgttgcatgtttattaattcctccattaatcaaagttcatcaagtattattatacgttctagcacgcaaaaaagcgaaaccaaaaggttccgctttttaaaatctagttaataatttttttgttattgggtaaaggtgtttcacacactgctcggtaatatttcctaggaaatattacttttattgatcaataccccaaagtaaaatgttaaatgctaatggtaatgttagcttggtaatgtatccatcctttttagcctgttttaaagatgctagaacaaatttacgttgttgacccgttagctttttggctactttaacagctaaattaaagtcatactcgttttttctaatagcatttttgataactatctttgcccacagaaataggttgagaatcggagtttacagttacaatgtagctccacttgctaagtcgaggaatatttttaattgttatagctttatcaaacttagctactgcagttgaattgctgttgtctgcagcgttggcagtgacagacgatgctgaaaataatgctgcaagtaaagcagtagcaagtaaactaattagagcttttttagatttcataatttagcatctttttacacatagtgcttattggctaataagcattaattcatatccaacactgtctattataagcatctgtattctatttactagccaacaaactattttatatttaaaatcgtatataaaatgaggctatttcccaggaaatattttcccatacaaaaaaagcgggacaaacgtctcgcttctttataattactcaaccaaattagtgttgtgaagcacctgaaaccgtatcaggagcaggatcctcttctggttctgattcttcatgttgagatgcacctgttgcagcgtcagcttctaagccgtacttttctgcaaagtaactgaatggcttcaagtcttcagcttgatacttcttgacaaaggctgggtcgtcaagtgagttcaactcagttgagtaaggcatttcgtgagtgtacttgacgtcgatcaacattggaccgtccatcttcttgaattcgtcgacagcatcttcgaattccttcttggtgcgaaccgttacacccttaacattcataccttcagcaacctttgcccagtcgttatcagggataataacaccagataatggttggtgagattcatcttcttgttctgcttgaatgtaacctagtgtttcgttagtaaatacaatattcaaaacatgcatgttgtaacgagccatagtaagaagttcttggttcatcatagcaaaaccaccgtcaccagctaattgccatacttcacggtctgggtaaacagttgctgcagtaagagcagctggagcaccataacccatagttgcgtgcaagcctgaagtagtccacttttgatcatcatgcaagttcaaaagacggcatgagtcaacgttaacgttaccaacatcaatagcaaagatggcgttgtcatcagccttcttgttgataacatcccagattggttcaggacgtacaggcatttcatctgagttcttaaagcttgcttgccatgcatcccagttctcacggtctgcaatagcagccttgtaaagtggtgattcgctacgttcttcaccagcgtcaataattgctctcaaagccttcttagcatctgcaagcattgaaacatcagttgagtgacgcttaccaaacttagctgaatcaacatcaatttggataaccttagcgttcttagggaaccataaaactgagaatggtgagttgttacctacccaaacaactaagtcagttgcgctttggacttcttgagcagccttaggtccgatacggccgatagtacccatgtatgctgggaatttgtcttctactacacccttgcctaagtatgatgacataataggggtcttgaacttttcagcaaattccttaacttcttcaccagcatcctttgcacctaaaccaatgtacatggttgggttcttagcttctttcaaaagcttaacagcttcttcaactgaagccttagttggtgctggataattgtctgctggatgagcatccttgtttacacggaaggtgtcatcaatcttttgccaaccgtagtccttaggaataatgataactgcaggaccctttcttgcgtaggcttgacggatagcttcatcagttaaaattggaatttgttcagcggtcttagcttggcggcaccaaacactagcgttcaagaaccacttgtcttcatcaaaagcttggaagaagtcaatatcttgacggctagttggaacgttagcaacaattgctaccattggagtcttgtcaaacttagcatcatacaaaccattgaataagtgggcagcaccaggaccagctgaaccgaaacatacacccaacttaccagttaacttatattctgcagaagcagctaaagcaccagcttcttcgtgacgtacttcaataaatttcatcttatctctaaagtcatagatagcgttcatacttgagtcgaatgaaccacctgggaaaccgtagatatgatcaattccccaatcgtaaataactttaagcattgcatcagaaccattaatttttgtcatataagtgcatctccttaacttttgttctttcataatgtattaaaacactttttttcacatttgcaaaccgataaaatcaccgttattacgcaaatgaaaacgcttttgtaataataatcacttcacaagctttaccaaattcaatatctcaaaaagctgaatggtagcgttttatattgtgatttgatgaacattattatactaaatttcacttattttatgtatattcattgttacttatagtaaaaatttaagaaaaaattttttacaatttatttcatagctatccaatttagaaaaacgttattttataattttgcgcataaaaataacgtagaatactattcctacgctatttttgtgctattctactttttcactctagagtaacgcccattttgaatgtaaacactcaagattgccaagtcagctgggttaactcctgaaattcgttctgcttgagctaaagtttcaggacgaattttttcaaatttttgccgtgcctcagtagctaaaccttcgatttggtcataatcaatatctgctgggatttttttggcttcttgtctctttaagcgagcaattctggtttcttctttcttgatatagccagcatacttgataccaatctcaacttgttctttaacgtaacgatcgcctggaactttttcaccagttaaccgttcaatatcagcaatagtaacattagggcgacgcaagaaaacatcggccttaacaccggccttcattggttcctgaccaatactttgcaaaaattcctgcacctcatcagttaaatgaaccgtaatttcatgcagtctcgtctttgcatcttcaatcgcatgcttcttttcttcaaatcgtgcgaagcgttcgtcagaaattaagcccagatcatgaccatattcagtcaaacgcaagtctgcgttatcattgcgtaaaatcaaacgatattctgctctactagtaagtagacgatatggttcattcgtccctttggttaccaagtcatcgattaacacgccaatgtaagcatcgttacggcctaaggtaaatcctggcttatcttgagcagataatgccgcattaattcctgcaattaaaccttgaccagctgcttcttcataacctgatgttccattcatctggcctgcagtaaataaatgctttacgtttttggtttccaaagtatgcttcaattgccatggttcaaccacatcgtattcaattgcatatcctggtcgcatcatttccgcatgttctaatcccgcaacagaatgaatcatctttaattgaatttcttctggcattgaagttgaaaagtcgcctacataaacttccttggtagtctttccttctggttcaaggaaaatttggtggcgatccttatctgcaaagcggacaactttgtcttcaattgaaggacaataacgtgggcctacacccttgataattccagagaacatcggtgcacggtcaagattgtttctaataatcgtgtgtgtggttggattagtataagtcatccaacaagaaatttgtttttgtaaataatcttcatcacgactttcatatgaaaagtgccgtgggattttatcaccaggttcttcctcagttttagaatagtcaattgtattgccgttaacacgtggaggagtaccggttttaaaacgacgcagcttaaaacctaacttttctagattttccgacagcttaattgaaggagtagtgttatttggacctgaagaataagtcaattccccaataataattttaccgcgagccgctgtacctgtagtcaaaacaacgcttttagcatgatacttcgcaccagtattggtaatcacacctttgcagacgccatcttcaactaccaattcatccacgatagcctgacgcaaggtcaagttgggcgtattttcgatcgtatccttcatgtgttcatgatattgccacttatcagcttgagcacgtagcgcacgcacagctggccccttacccgtatttaacatccgcatttggatataggtagcatcaatgttctttcccatttgaccacctaaagcatcaatctcacggacaactgtccctttagctggtccaccaacagatggattacatggcataaaggccaccatatccaaaccaatcgtaaccagcaaagttttttgtcccatgtgggcacttgccaacgcagcttcacatccagcatgcccagcaccgacaacgattacatcatattcatttgaatcatatgttttaaccattttcatcctactttcctaaacagaattgactaaataattgcgtgattaattcatctggggcactttcaccagtgatttcacctaaagtatcccaagcaccagtaaaatcaatttgtgcaatatcaacagggacgccatcttcaactgcttgaattacatcttccaattctttcttagccttatgcaataaggaagcttggcgttgattggttaccataatttgatcattagaattttcaatcccagcaaaaaatagcttattaatcaattcttcaagcgcatctaagttttgttctttcaaaatcgaagttgaaataacatcactacccgttagtttctccatctcagtagttgttattttttgacctaaatccgacttatttaagatcacgattcgcttcttgtcctttgttgcttcaattaaggcttgatcttcagctgttaatgcttgactagcatcgattaacaacaagaccagatctgctcgctccaaggccttttttgatctttctacaccaattttttccaccttatcttcagtgtggtggattccagcagtatcaattagctctagcggtactccttttacagacacatattcttctaacgtatcacgcgttgttccagccacatcggtcacaatcgctttgtcgctttgagtcagataattcaataaagaagactttcccacattaggacgaccaacaattgcagtagccaaaccattgcgcaagatttttccttcttgtgctgtcttcaataagcgattaattttatcaattactgatctagatgtgtctgccatctgttttgcggtaacagtatctgcatcatactctggataatcgatattaacctcaacgttagccaaagtattcagaatttcctgccgcattgcctgaatcttgtgtaacaatccaccagctaattgaccaacagccacttgtcgtgccttatccgtcttggcccgaacgatatccatcacactctcagcttgagttaagtcaattcgtccgttcacaaaagcacgtttagtaaattcaccaggatcagccattcgcgcaccgtgactcagcaacaattgtaaaatatgattagttaccacgattccgccatggcaattgatttctacaatatcttcacgtgtaaaggtcttgggcgcacgcagcactgtcaccattgcttcatcaatcgttttcccagtatccggatcgataatatgaccatagtgaatagtatgtgtcggcaccttgcttagatcttcgcctttaaaaacctcatcagcaatcttaattgcatcctcaccagacattcttacgattgaaattccgccttcaccgatgggggttgaaattgctgcaatagtatcgaactctgtcaaagtttgagccataattcttcccttttctcaataaaaaaagcgcattataccaccacgaataaccatgatggataaagcactttgactactttatctaaaaatcattttagactaatattcttttatttctttttgcgtcctaaacgcttgtaagcccttcttagtttacgtttgcgttcacgctcagcctcagcctttgcttcttgctctcttctatatttaatagggttttgcaagataaaggtttgaagcgcctggaacaagttggaaattacccagtaaagtgtaatagctgactggaagtttaaggccatcacaccaaccatgatagacattccgtacatcattactttggtcattccattttgcgatgattttggcgtcgataattgactaatatacgtcgataagaacgtaaagatcattgctaaaataggcatgatgtaatatggatcgggcttgcttaaatccatccataagaagcgcccagtttgtaactgcggtgtacgtaaaatcgcaccatacagtgcatacataactggcaactggatcaggacaggcaaacatccagtataaggatttacgcctgcttctttataaagcttgttagtttcttgttgtaataatgttcttgattcagtgtcacgtcctggatatttcttacgcaactcattaatttgtggttgaatgctttgcatcttagtagtacttcgaattgaaatagcattcaaaggtactaagatgacacgaacaatgacggtgaagacaataattgcccagccataactgttccccattaacttagctagccccaaaataaaagctgacatgtaataaacgatccaacggtcccaccaattaccacttgtatgtgagattggcgttgcttgaccatttgctcccgtagtagcacatcctgtcaatacaacagcaagtattgctactgctaagactgcaagaagacgtttgacatttctcttggtcagaatgtccttcaatctatttttcctcaactttatctggcatttcttcaataatatgagctaacgataatgcgtgaagcaagtttttacgcacctgagccatattaaaatcgcgagcataaggtcgcgtaatgattaaaaaatcaacatgcggattaatctgcaatttttcttcatcaatcacggcccgaatataacgcttgagtcgattacgtgcgactgcggtatgaccaacctttttgcccacagaaattcctactcgaaagtgtttattttctgttttttctaccttataaatgacaaaagctcggttagcgactgagtcgccagattcgaaaacttgctggaaatctttttcagattttactcgataagactttctcaaaacgtttcattccactctagtagactaaaaaaaccactgggattcagtggtttaagcagataagacttttctaccttttgcacggcgtcttgctaaaaccttacggccatttgatgtgctcatacgcttcataaaaccgtgaacacgtgaacggtgacgcttcttaggttggtaagttctcttagttgtcatattaaactgcacctccataaatttttgtgccaattgcacaatgtcttattaaggatagcacgaaaagccataaaaaccaagtattttaagaaaaaaagacttttaaatcccgtgaatattttctaaaaattcattgtttttcatgtggataaaaaataaaatatttttcttacgtataatttccacaagataattcccaacgttttccacaactcacatggtgttaaaaacttaattcacaccatgtggataacgcatatggtattttacctcaagtattgatagaatagtatccataattcacagctgtactgtgcataaattaacggttttgctcttatcatgtcaaaatgtgcatatcgctttaatagttgtcaacaggctgtgtactttgttgatttctttttcacctgtggaaaaccagttaagtaaatggtaaaataaatttgctttttactaactgggggaatgtaca

SEQ ID NO: 8 - DNA, 174268 bp, Lactobacillus crispatus
  source 1..174268: mol_type = other DNA
atggaaccattgaaaaaatcaaataatgttaacgctagtcatggtacgggtacccctgttgtaaataaacctggtcaagtaaatagaccaagctttaaaactaataaagcaaagaagcaagtattcggatcaccaaaaaagccaaagaaaaataataaaaagaagaataaaggaggtatgccactacctctaaaaattggaggtggagtagctgcaggtgcacttgctgttggtattattggttacgcaatgaccaataaccacgctaataattcagcgtctaataaagataattcaactgattcagatttaactggaaaagggtcagatgatggaaccaatgatttaactaaaaataagaagaaaaattcaaataataaaaaatctaagaagtcaaaaaaagatgggaaagaaacagatttactaaacgatattttggacggtgaaggtgctaaagcatctgggaaacattcatcaagtaaatctagctcttcagaggaattagattctcttattaagtcaatgggttcagatagtaaaggttctcataaaggtggagctagtttaaaacagttagctaaaaaagctaccgaaagtaaggctgtagctgaaaatttaggaggaagtaaatcatccaaaatttccgaaaaggaaaagtcaagaaatgaaattggaactgagaaaaagaatacttcagaattacaacaattagccaacaaaaataagaacgcaaaatcagtaagtagcgagcctaaaatccctggtcaatccaacatcactaaaggcactactactaatagtaaaaacactacacatcataatatatctactggaacaaagggacagccgacgacagcaccaggtcacggtcaccacggcggtggtactcaaccaactggtcagccaacaacagcaccaggtcacggtcaccatggcggtggtactcaaccaactagtcagccgactacagtgccagatcacggtcaccacggcggtggtactcaaccaactagccaaccaacaacagtgccagatcacggtcaccacagcggtggcacccaaccaactagtcagccaacaacagtgccagatcacggtcaccatggtggtggcactcaaccaactagtcagccaacaacagcaccagattacggtcaccatggtggcgaaactcaaccaactagtcagccgacgacagcgccagatcacggtcaccacggcggtggtactcaaccaactagtcagccaactacagcaccaggtcacggtcaccatggcggtggtactcaaccaactagtcagccgactacagtgccagatcacggtcaccacggcggtggtactcaaccaactagccaaccaacaacagtgccagatcacggtcaccacagcggtggcacccaaccaactagtcagccaacaacagtgccagatcacggtcaccatggtggtggcactcaaccaactagtcagccaacaacagcaccagattacggtcaccatggtggcgaaactcaaccaactagtcagccgacgacagcgccagatcacggtcaccacggcggtggtactcaaccaactagtcagccaactacagcaccaggtcacggtcaccatggcggtggtactcaaccaactagtcagccgactacagtgccagatcacggtcaccacggcggtggtactcaaccaactagccaaccaacaacagtgccagatcacggtcaccacagcggtggcacccaaccaactagtcagccaacaacagtgccagatcacggtcaccatggtggtggcactcaaccaactagtcagccaacaacagcaccagattacggtcaccatggtggcgaaactcaaccaactagtcagccgacgacagcgccagatcacggtcaccacggcggtggtactcaaccaactagtcagccgacgacagcgccagatcacggtcaccatggcggtggtactcaatcaacaactgctcctactccaacattaccatatgaaaatgtacccgatggaactactaaaactgttcaatttgtggacagcgatggtaaggttgtaggaactggagaattaactaaacacggaaatggagtttccctaaatgacattccaagcggttataaattagctgatgaagatgcaaatgggaagtcagctcagctacttcaatggccaaatcaaattagtgtagtatcagatggcagtcaaccaacaacaaaatatccgtctgatagtgtacctgatggaactactaagtctattcaatttgtagacagcaatggcaaggttgtgggtactggagaattaactaaacacggaaacggtgtctccttgaatggcattccaagcggttataaattgtctgatgaagatgcaaatggaaagtcagctcagctacttcaatggcaaaatcaaattaaagttgtttcagatggtagtcaaccggcaacaccaacttatctgtttgaaaaagtagcagatggttcaagtaagcctgttacttttgtagatagtcaaggtaaaagtgtaggtactggtacaattactaaagagaaaaatagtgtaaacattaatgatattccagacggttataaattagcggatttggattctaatggacaatccccacaactattgcaatggccagatcaaattagcgtagtgtcggatggcagtcaatcgagccaaccgacaacaccaacttatccgtttgagaaagtagcagatggctcaagtaagtccgttacttttgtagatagtcaaggtaaaaatgtaggtactggtagtattactcgaaatggtaatggcgtaaatgttagtggtattccaggtggttataaattagcagatgaagatagccaaggacaatccgcacagttgcttcaatggccaaatcaaattagcgtagtgtcggatggtagtaaatcagctactccaagttacccagctcaaagtattacaaatggtactagtaaatctgttaagtttattgacgatagtggcaaagtagttggtacaggtacaatttctaaaaacggtgacagcatcaatgtagatggtattccaggtggttacgaattgtcagatgaaggtagccaaggacaatctgcacagttgcttcaatggccggatcaattatctgttgttgctacaggtggagcaccttcaacaaatcagtctaccggtaattctgaaggtcagcttatcaatggtgatgcttctaagacttatccatttgaaaaggtagcaaatggaacaacaaaagatgttagttttgtagatagcaatggtaaggttgtaggaaccggtaaattatataaaagtaataattctgtgagcatagatggtattccaggtggctacaagttatctgacgaggatagtcaaggacaatccgcacaattattagattggcctaacaaaatagtagtggttgctgacggcagctcaaagccaactactacttatgcagcagaaaacattccagatggtacaagcaaatctgtgaaatatgttgacatgaatggcaatgtactaggtacaggtacaattacaaagcatggcaatggagttagcgctgatggtattccttatggttataaggttgctggtgcagaaggaaatcaaatgaatgacttattaaactggagtgatcaaattactcttatgccagcaaattcagcaatagcttaattcttgcaattagatgaatgtaaaagggcactaaaaaaagtgcctttttatttacgagaggtgctaaagatgacaacagtgattttagcggagaaaaaagatcaaggtcgtaagtatatgacttaccttggtatcaagcatagctctactgcttcaatggctagtgggagtacatttttagatccgaataccatagtagtgagtgcttcgggacatttaattaagttacaggaacctgagtattatgattcaacttatgaggatcgggataatatgagtattcttcctttgataccacctaaatttgcatacgaagtatcgcctgaaactaagttcttattttatcaagctaaaaaggagttaaaaaaagcagatacaattattattgctacagataatgattatgaaggtggagctattgcttttaatattttatggttgtcaggaattcttagtttaaataagcatattctaaggtcttatccgacagctatggaaaagaaagcaattattaggcaattccagaaagaacgtttaaagccaattgatgagacttggaggcaagctagtgctgcgattgctagatctagaagtgattggctaattgggatgaatttaagtagactttatactcatgaactatatcaattgggtattccgggcaattttgcagtaggcagagttattacagctaccttaagcttgatttgtagttggtatgagcaaattaataaatttcatgaagagcctatttatgaaatggaaggaacaataaaaaactctaatgacccaataacattaaaatcaaaagttagaattgtaggagatggaaaaagagatgcaaaacaagaatatttaagattacttaaacaacataaacttttgcaaaaacaaatgataggaaaagtatcgcaggtggaaagtcaaactaagaaaaccatgcctccaattttaatgacaaaaggagatttatataaagagatgaaagaggcatgtggctggacgcaaaaaaagacagaagatactatgcagattaattatgaacggggatatcaaacttatccaaggactgattcaggattaattgatgaagaagaatatgattatatgggggatctatttgatcagtatttacatgcagttggattggataatagttttaaaaaatatgatatgccggaatccttgaagaaaaaatatataacaaattctgatggttcaccacaccttgctattattccaacagaaaaggtaatgcctacccctgatgaagagaaaagaattattgagaaatttaaagcacttaagcaaaaagcggaagatgagaaaaaagctgctactaataaaacagataaagaaaaggcagaagaattaataaaaaaatatacttatgttcctttaacaaaagcccagcgagaaatgtataaagtagtagttcaaagaagtttaagcatatttcaaccaccgtatgaatatgtttcaaataaattagttgtagatattaataatattgcattttcagctcaaaataccagtaagataaatgacggctggcgtgccatactgcctaagtctaaaaaaaagaagcgagaattaaaaaaaagttttgattatcgtaaagtatttaaagtaggacaagaattagcagttactatgcatacttcacttagtaagacagtaccacctaagcctctgactattacccagattttttataaaggcggattaatggagaaagcttataaatatgttgaaaataaggagtatgctaaaattttacgcaatgttaaggggctggggacctctgctactcgtgatgctgctttaactagcttagaaagtaagaaatatatttctgttgataaaaaagatataattacggttactggcaatggttggttgattaactggttattgaaaggaatgcctgttagttcgccagtattaactgctaagtgggaagaagaatatcaacgaattgcagagggaaaagataatcctaatattttaattgaagcaactgctaaaatgattacagagcaattcaataattttagtgaaaactggcatccagaagaaataaaagctttttatcagaaggttcaaggtaaattcttaaaaaccgtttcattggggaagtgtccccaatgtagtaaaggtgatattgtctttattgcagataaaaagggaaagggtaagtggaatagatatggctgtactaataaagattgtaattttgttatctggtcaaagttcttaaataagaaatttacagagaaagacattgagaagttaatagcaggcaagaaaagtcggttattaaaagatgttaaaggcaaaagtggtaagaagtttgagtgctgggttaaattaggctacgatgaaaagaaaaaatctttaacaccacagatgatatttcctgagaagaaaactaataaatatgctaaagacttttatggaaaatatcatcgaacagattaagaaaagtgctgacaattgtaacatttcattgaaaagtaagtgttaattgtcagcacttttttaatttgcttttactgtagtcactggtaattcgaattgctctgttttaacaaaataaattaaatttttacggtaattaactagtgatgcagcacttatatgtaatttttttagtaattcagtatcagtataattttgctgaattacggagtagatatagcttcttctaagtgattgaaaagtgagttgcattcctaaataattgcgatcagccataatatgttgctcgatattgaattgggatgcatagggatgaccatctgaagtttcaaaaatataattatttttagaattttgtttgtttttgcaatcttcaagatagcttttgatttctttattattaacctgacttattatagttgaatactttaggctaaggatggatttagtttcatagcctagagcaatgcagataagtaataattttgtttcagtgtgcagtttagttgacttgatcaaaattggtaggtctttcatccaattaatcttataaacatgctgacgtgaaaaatgtctacctttaatatttacgagaggatagtgggttattaaattgtgatcatataggaaagtaaagtatgaacgtatgtaacttaaatatttattgatagttgatttttttaaatttttttgttgctcaagaaaatctaaatactcagctatagtagattgatttatgttgtttaaagtagcttctttaattgaattgacagtgtagtagttccaaaaatgagttactgaattcgctattctagtggctgtatttgatgaaagtctacgttcaccgatcagccaatttctaagagctgtttgataaggaaaactaatcaagatttatcatcctttaggtaaaaatatggttttacaagtaagtggaacaggattaattaaaaaaattggtaaattgcatttaaaagaaaatcgctgttaccttcaggtaatcgtaaagtatgttatcaaattacctgatcaaactgctgagattcggttgattttgagtcaaagtataaatttacagcagaagcttagcaatttaaaattaaatgatttaatttactttaaagggcaaatgagccaggattctactagtttgtttattttttgtagagcatttaaaattgggaaacttcaaaggataaataatttgaaaaattatgaaaatcctgatgtaattgataatgatttgttgagattatccttatttaaagcactaaaaaaactacaaggtacaagtcaataataccttataaatactctcaagcaaagtaagaaaaaagaactgaatattaattattagaataaggggttagaatattgacagcaaataaagacgttaatgatttaatgaaagagttacatctaaaacgtgaggaaataaaaaatgcctttttcaaattgcccaattatattgaagtaatgggagctagaggcggtatgcgaaaagaaattaataccgttattaagcatttttcaactcaaagtttaatttctgatcagttatatactttaattgttaagcaattcaaagcaaagaaaaatttagtttcagtaactgagattgaaaaagatcatcgactaaatgctgcaaaagttaaccaatttatcaaagaattaatggttaataataaatggtttgattttgacgcacagaatatctttaaacacgccaattataaatatgtacaaaatcgtaaggttaaaggatttgttgatcagtttttcgactggatgcttggaaatagtgctaaatttcattatcgtttattaaacaaagaaacagacgaagacgatgacttttttgctcttgaagaaattcaagctggaaattctaaaaaaggcagaatactaggttttgactgtgcaattgatggtaaaattgaagctatttgtggtttttacaatgggacaattaaatttatgccctctttgcaacgctcatgctcaggtttaagatcgccagaatttgataaatttgatcaatttgatcaatttaagcgtcctgtgtacttctcatttgatcgtgctgaattaatggatagacaattaaggacacagtttaatctgtttgtagcttgtttaagtcttagaccagttagaattcaatatggtggtcaaaaaatgagagtagtaacgactaattttgaatttaaattaagtgatttcgagcctaaggaatttcagtctaaaactaagcaaggattattaagaagacaatttggtaatatcaattcagataatttccaaaagtatttaagtcaacatttatcaataaccagtatttatcagtttctatatgagcatacgcacgaaaaaggatcagatgtaactactgataaagaaggatatatgcaagactatgttagttttaaacgctctaatggttcaactaagaaagatactattgttgttagctctgatacatatccttcttgtttctgggtacccaaaacagtgaaagcgcaactggataaaattggaatttctgctggattaccaccagagtttattttagaattctggttaaagtatcttggtgatttgaaatcaggaattgatgaaaaagatgttgttaaatggctagacaatgagataattcaaactaatcaaacaatcacagcaatgattgatcactggtgtcaattacttggtactaataatcgtcttgaagcaatgcaacaaattgatggcataattaaaggacgtagaaagcccaaggaagatattagtgatgatgatattgaagatgatgactttgatgacggattaggagagtaaagttagtagaaaggctactagctttttcttttgacaaaaagtggacaaaaagtggacattgatataccatgatggtgaggagaaaaataatgtcgaagattgatagatttgaagtagcagacagattaggtgttactacgcgaactttaagaagatggaacaatcaaggaagattagtgccatttagggatgcaactaatcatccgtattacacgacagatcaaattgaaaacttcttaatgaaaggacataagattaagcataggataatttggacatctaaacatttgaataaaactaaattagtgactttactgtccaaatattctaaagaatatttggtgttacaaagctccaatatatctttgggtgaagatattcaattatctagaataattacatatgcgttaaattatcaattgggagagttaattatttgtaaagatcagttaattaatcagcaagcatttgaggtcttacggacatttttaagaagatttaacgttaaagttacaagtattgattaagaattttaaggagaaaaaacatgactaatgaaaaaattgactggagtaaaaaagaattagtaatagaaaataatcgtatgcttagtagatggggattaaggctagcatatatggttcaaatgcaagatcgtatttttttatcaaatgtcattttatttactggaataagaacaactaaacatcaatttaaaagtgttttgacttatatggtacaaacagagtatcagattaaattaatggagtgtgttctttttagacgtcatgatcttagtttaatgcttttggatatcgactttaattctttgagctgggctaaaaaacaaacctatgaatggtttaaaacattaccacgtcaattaatgtataatcatggttatgtactggactctaaaacatttaattacattttaggagatgtaggaattaatgcaactaacatagttgatgtgcctaaaataactgatgaagccaaggataaagctagagaatatgctgaatcatggtttaaagagaaatatgatcaagaagcaaaagaaatgaaaaagcatgaggttaatgaggatgatttcgataatttaatggatatgtggtacacagaatttgagtggtatcctgatgacaaattatcttgctttaactggtaaaaaacgattaaattttactttattatttttcaatattaaaaatgttaccttttattctgttaaataaatgaaaggagcaatttatgaaggaaaacaaatattttcttttaactcaaaattatgaagaagttttgtcaaatgccattgatcaatgcttgatgcttttcggtaagagcaatcagacaaatgaaaatattatcattactaatgtgggacaatacttaattgatttggtagataaaggtgacagtgtaaagattcctgcagtgactgataatatttttgtacgttctatgggattagcttttacaattcgtttttacaaggataagcttgcactaattagtttagttaaatttattttgactgtagcagataaggcttttgcagctgaaaataatgatcatgaaatagaaaagattgtgggtcattatgatttggactaaagttatgacacagaaattatttggaggatttaataatcaagataacaactcaactattagatttttagaacaagacaatgctggtacttttagtcttgataaggaagttaatcaaagtccatacaatccatacgttttaaataatatggatttcctaagacttattaaaaatgttctagctgataagcaattacaagttattaaggttatgggtataacttgtagtcaaaaagtagttaagacagccacgcaactaaatagtagtcaaattatagcagcattagctaatattcaatatttaactgcgataatgataaaagaaacatactaacctagtgttggatcatgaatcgacggattcacgatctggcactttttattttgtctaaaatagaaagtgaagataaagcaaatcaagtcttcagctttttagacacttgatgtcgtaaaagaaacggactgctttaccacctattcttaagtctcttcgaagtctgtgggcacttagatgccgtgtttagaaaattagaattaataggttgataaagaggtttatcttcacagcggaggttatattatggaatcacaaattattttcggtattgatgttagcagtaaatcttccacagtttgtgtggttaatgaccggatcaaacaaggcgaatcttttagaatctctaatgattcctttggctatcaaaaactttatgagcaactgaaccaatatttgataactcctttagttgttttcgaagctactggtgtttattctctaagcctgcaagctttcttagaggattatcatattaagtatttgaagcttaatccgcttaaagcgaaaaagctaatggacaataatttacgccataataaaactgataaggtagatgcttatcgcctggctttaattcaatttaatgccccgcaaaagttgcgtgatccacagcccagagagtatcatgaacttcagaatgccagtcgctattatgaagaacttactaggagtatagttactactaaaaatcaattgcaccgcaacctccaatccactttcccacaaattgaagaaatactgtctcatccatctggcagaatttattgggcgcttgttagtcttttcccacatgctggatatgttctagaaaagaatgagacacaggtaactcaaatgcttaattctatttctggaataggacaacaaagggcacggtacttaaccacaagattatacgcttttgctagagaagcttatccttatgattccaaagatagtattatcgttagagctattcaaaggaacatttctaatttgttttcactccagcaagaacgcgactatgtaattaactacatggaaaagctggctaaagcagtaaacgctcgtgctttatccatctatttgagtatcccaggggttgctagaattacagcagtgagattagtagcagagctcggtgatctaagacggtttagcacttcagctcaaattgatgcgtttgttggcattgatccaggaaggtaccaatctggtgaaaaagacagttctcttggcattaccaagcatggcaatcatattgccagaaaaatactttatcgagttattattcaaatggagacggtaaaggctacgcagccttgccatataactgattattatgacaagaaaaaacgatcttcaaatagccaaggctataagaaaatcgccattgcatcagtccataaactgatacgcacaatgtttgctcttatcaaacatgatcaattatatgattacaacatagccaccaaaaataaaagactttagctgaaatcaaataatcaacttaagtataagcaacctatggaaaaactacaagtattcataggcttatttgtggtactttcgctttttcttaaatttaaactcttatttgctttaaccttattcgcatcattaaaacaagtaaatttattttcttaaatcattgataatacttgactttgggtagaaaaaagcaggtgacgaatcagcaataatccagaaaagcggtgttatccagctaagtaaaggaaataaaaaaataaatcgtgatttaactataattttaaatagacgataaagaaacagtttttatgaagtgtttaagataaaaacgacacttttcgaaaactgtttttttcttacgtagagactgttgagttagaactgaacgagactgtaaaatagtttgtgtaaggatgaatgattccttaaatttatttctttaaacattagaaaaaggagttcctttctcgtatgattggtttgaacaaaaaacacatacagaaagaagaactccttcatgaatgattttaccagagattttgctcaagctctattcaatccagacaaaataaatgatttattgcgcaaagagctacaacaggctgttaataacttgctagaagctgagttgactgcctttctaggctatgatccctatgccagaaatggctggaatactggcaattctagaaatggtgcttatttccgcaaggttgatacccagtttggacaaattgaagtgcaagtgcctcgagaccgcaacggtcagtttcatcagcacacgctgcctgactacaagcagcactctgatgttttggaaagcacgattatcaagctctactccaaaggcgtaactaccagagaaatcgctgacttgattgagaaaatgtatggcagtcattatagtccagctcaagtatcaaatatttccaagcagatgctccccaaggttgaggcttaccacaagcgcaagctaagcgacaagtttttctgtgtctatttggatgcgacataccttcctttgcgccgagaaacgtttgagcgtgaagcagtatatattgccattggcattaaacctaatggacataaggaagtcattgactactgcattgctcctagtgagaacattgaagtctggacagagatgcttcaaaacatgaagtccagaggcttgaagcaagttgaactctttctttctgatggtgttgttggcatgaaaacagccttggccaggacttatcctaaagctcattttcaacgctgcctggttcatgtcatgcgcaatatctgtgctaaagtccgggtggatgaccgcgaaaagatcatgaacgaattcaagcagatacatcaacagacaagccaaaaagaagctgcagctgtcttgcacaaattctatgccagatggaataaagtttatagccatgtcatcaaaggtttgaaggaaattgagcccgatctgctggtcttctacaattatcccaaacaaatcagagcttcaatttattcaaccaatatgattgaatcctttaacaacgtcatcaagcgtaaagctaagcctaaggcagaatttccaactgaacagtcgcttgatgcatttattggcatccaggcaatgagctacaatgaccgctatttcaaccgaattcataaaggctttggtcaggttcaggataccttagaatcttattttgaataaataattaaaaaatcaatttacgagaaagaactatttacacaaaagatttgacaggttcaactgaactcttgataatatcttagtatcaatttttatagaatattggagtaatatttatgaaatataattttgaacaaactcaattatcatcagttgaaaagaaagctattcttaaatttataaactttcataatatgattgttcctaaaagactagctttatgccttcttactgtcgacgagaagttttggaataagtcagatgctattttagcttatttggaagataactacattagtggtgattcatggcctgaaatttggcaaaatatttgtaagagtatatggcttgagattaatgcaattaaggaattaggtgaatatgtttcttcagaagagaaatttgatgaacaaatatgtatgattaaaaaggcaaatcaatttattactaatcagatttccaaagaaattgttaagtaaaaaaagccagcactttattttaagtgttggctttttctacagttagttattattatcttaatgagcctgcaaatgatggaggaaatgctgaaatacttccgactgagacattttggccataatccggtgctgctacgaatttatcaccaccaatgtagattgctacatgataagaatgaccaggttgtccccaaaatagtaaatctccaggttgtgcttgagaaacaggcttttcatttacacatgattctagctgaattgtgttgtgtggtaacgcaatacctaattgagcgtaaacataatcaaccataccggagcaatccattccggcggtggaattaccaccccagacatatggaatattttcttgagtaagttgtagagctaaattaacggcacgagatgatacggtatttcctgatactgcattttgcccttgatgaacggtagatttacttacactagaagtagagttagtgctaattagctttaatttttgaccaattaaaattgttgaatgccagtttaaatgattgagctttaaaacatcgttagttttaagtccgtattttttggcaattgtagaaacagtatctccttgcttaactacataagttttaggaatatcaggaatattaatattttgattaggtgtaagagatgaattggtatttaaattgttggctttagctagttcctcagctgtcatatgatgatcttgtgcaattgattgaattgtgtctcctgacttaacttgcacagtatcagcatgtgctacagcagtacctaaagtagctgaagctgaaccacctgctaagaaagcagaagctaatttaaatacagtagttaatttattagtaattattttaactcattcctttcaaatctgttggacgaggttttttgataatttgcaatatgttttaaaagagtagataacgtgtgcatccctgtattgtttttcttccaaagtaatttgcattttgggccaattattctttttatcttgtggcagcagtttgaaaatcatccaaagagtagctttgtaattactacgataagaaacttgtttatcttcaaagacatcaaaatacaaagatttagtctttattgcatctatgatgttggggcttgctactttacgattgtttaaacaaatttctttagtagcgatcaatagtgcaaaaggaaaattgtatttatctgtatgtcttagaaaaataaaatccttacctttagttaaacagtaagacataagcttctttgaaaagtagataccagtataaaaagatagagttctttgtaaattttatttgttaatcaaaagattattgtaattaaaagtcttagttaaacatgggataaaagaaacattgtttgcacgtagcaggcaatgcttttttgtgtcttcattgacttctaatgaatgatttgatgtaaaagctaaatgcttggcgtaaagcgctatgccttgtctagcattataacttggtttaacaagagccgtaattggatttttgcaataagggcaaaatgcgatatatctacttgataaatacgttggagcaaggtaccgttgaacgttatgtagatttaaataatgccaatgcttatctgttagattagttaagaaaatcttcattgaaatagtgcagccccttcctatcaacgtatctgattccattatgtacgtatggggtcagagcaaggtaaaagtaaaagtttacgtttttttgaaaattaggtcaacttacgcaatacgactcacggtcagcaaatacttaaacttattaatagaaattcaaaagatcagaaagaggaaaaaaatgagcgcaaatacaaccaaatattcaagtattagtatggcattagttgatgattttattgattattccaagcaattgaaaaacagcttcaagggggcttttaatcctttagtatcaatttattcaatgattacagaacttgatactaccaagcaattaagcaatgagttgttgcttgatgtaaagaagaaactacaagtactaccaactttttatcatgttcaagttactagattatttattactaggtttgtaaaagaactagaaccggatattcaagaaactgagctaaatagagactgtgttgacttagaagatatgttaatggctgcctgttcagatttcgaaggctgggagcaaaaaattccttctatattagaggtactttacttagctcttagaagtggaattgataataagcaagatactgctttgcgtagtcgtgttaatttacttgtaagtgatagaaacgttcaagcacgtgttttatatgatttttgtaataaatatcaagataagtatgatactcgattaaagcagggggtatttccaagtgctagataaacgaaaactaaagtgtgtgttgactcttattattgcatttggttgtttattaattttaaacggttgctctatggttaagccatcattaagcaataagcagttaactagtgaatttagtgaagttactcaaagcttactaatatcaaggggtactgtagctaaacaggttatcggcaagaagcctaaacagggcgatgttaagatttcatctgccaatgctaaagtcttagctcaacaaaaggataaagtaagtcaaagtcttaagaaggtatcagcttctgcaggattagtagcgcaatatcctaaagcacttaaaaaatatgataattctgttttaggttatataactttgttgcagcacggcacaaccattagagaagctaggtctgaatttcataaagtagtagtagctggtcaacgaattaatattcagtatcagaacatgaaacagaaccgttatcttaatattgctactttcgcagatcaaacctctggatataaagcagatagtccattgtcaatcacaccaactaataagaagagtaagaaaaaagataatactcctgtcaataagcccaaagctcgaaatacattgaaagatggtaccaaagttaaaaccgttcatggtgcatttagattaagcattggttggggtatctactttattgtattggtaataataattattacatcaatctttttacaacctaatagaagtaatgattcaatgaatgccttaactgaatcaggtggtgctacattgtttaatcgtccacgcccacgtggatatgaattatttctactaagaactaccgaaattagtgtattagttttggccgcatcattacttatttataacaggataggataaagatatatgaactatttacaaaaagcttttaaggttttgaagaaatgtaattgggctacatggcttagctccattaaagttacttcagcaattctgactgttatggcagtaagcggagtagcttattgggggctagatattctttttcaaaagttgcttattaaatagaaaggaatgttttgatgaagctgagaaacttaattgaaaacaatcaatttaaacgaaaaaaattggaaaagattgttaagcgagttgaaagttatcaaaagtattatgcatcccttagtgatgataaattaaaagatagtacgatattatttaaaaaaagactacaaaaaggcgagaccttaaatgatattctcccagaagcatttgcagcaattagagaagcagataagcgagtcctgggcttattcccctatccagtgcagattatgggtggaattgtcttaaatgccggcaacttagccgagatgaaaaccggtgaaggtaaaactttaacagaaactatgccagtatatctaaatgctcttgagggcaagggtgtgcatgtaatcacggttaatgaatatctttcagaacgtgattatgaagaaatggggcctgtttttaaatggatgaatttaaccgtaggcttaaatagtagcaagatctttccaagtgagaagaaaaaagcttatgcctgtgatattacatattcaactaatactgaattaggctttgattacctccgtgataatatggtcatatctgtagaccaacaagtacagcgtggcttaaattatgcaattgtagacgaagcggattccattttaattgatgaagctagaatgccgttaattattgctgggaaagataaatctcaaaggaacttatataaacgtgcagatgaattcgctaaatcactagatgaagatgattatgattatgacaaagaaactaaaactgtagccttaacccctagtggagcagataaagctaacacttggtttggattaaagaatatttttggttctgaatcattcacagaagctcactttgtagatgaagctttgaaagctaattatagtatgaagcgtgatcaagactatgttgtacaaccaactaaggatgggcacagtaaagaagtagatattgttgaccaaaacactggccgtgttatggctggtagacgctactccgatggcttgcaccaagcaattgaagctaaagaaaacgttccaattaaagatgcagataaaacagaagcagatacgacttatcaaaattacttcagaatgtattcccaattatcaggtatgaccggtacggcagctagtgatgcacaagaattttatgatacatatcatatgcaggtaatcagtatcccaacaaacaagcctgttcagcgtcaagatttgcccgacattgtatttgctacaaaaagagctaagcttaaagctgttttagataagattattgatgttcattctactgaacgtcccattttagtaggtaccatttcagtagaaagctctgaagaaatttctgaaatgttagatgaaagagatattcctcatgaagtattaaacgctaaaaacaatgggcgtgaagctgaaataatcgcacaagcaggccagcaaggtgcaattacaattgctactaatatggctggtcgtggtacggatattaaattaggacctcacgtcagagaactaggaggattgttcgtattaggtacggaacatcatgaatcacaacgaattgataatcagttgcgtggacgctctggtcgtcaaggtgatcctggtacttcacaattttacgtaagcttggaagatgatcttttgatcagatatggtactgaaagggtacagaaagtaaagcaacagctaatcgaccgtggggatgaatatgaacctattgaaagcttaattgttagacgaggtattgttgaagctcagaagagagtagagggcaacgcctacgatgaacgtaaaaacacggtaagatatgacgatgtaatgaaagacgagcgtgacgctttatatcgagacaggaataaggttcttaactatgatggtgactttgcagattatttgattcctatgtttgcgagaacaattaagttgaaagttgatctttactgtcagggaaataattggaattatgatggcttgtttagattctgcaaaggaactttaggctttgattttggcaagacagctaatcaggatttatatgtcaaagcacttggctatgaactaactgaagagcgaatcgaatcaatgactaaggatgaaattattgaaactcttattaaagtagcacgagaagaatatcaacatcgtattgatgaattagtaaatcctgaagatatttcgttcttccaaaaagtggcaattttacgggcagtagatgtcaattggagagaaaatattgctactatggagcaattccgtcaatcagttactttacgtggctatggtcaatataatcctttagtagaatatcagaactcatcatttgatctttatagtgaaatgctaacaaacattcaggaagacattactcgcaattatatgagagcaagtattgttgattaatcgggaggaaaaatgaataaaattcaagaatttgttaaatcgccgataactaaacgaatcagttttacgataatgattctaattatttaccgtgctttgttctttgtgacaattcctggtgtcaatagtgcggcattagccaagctatcaaataattctagtctgacaatgctttcaatgttcagcggtggtggatttgagaacttctcgattatgagtttaggtgttactgcttacattaccgctcaaattatagttcagttgcttcaagctgatgttattcctacccttactcaatggagtaaagaagggcaaacaggtagaaagaaattggataaggtaacaagatcgttaactctggtcttaggtcttgttcaagctactggtatcacattagggattaatacacttactaatggtaaatttatgattgaaaataatccttttaccattatagttattgcaatgttaatgactgctggtagtttcattgcaatgtggcttggggatttaattacagaaaatggattaggtaatggtatttctgtaattattactgcaggtattttagttcgatttgagaccgtaaaatattttgtgtaaggatgaatatttccttaattttattttcctgaatattagaaaaaggaatccttttcccgtatgattgatttgaacgaaaaacatactagaaaagagattccttcatgaatgattttaccaaagatatggctaatgctctattcaatcaggataaaattaatgatttatttagacaaaagctccaacaggctgtcaatgacctgcttgaatccgaattgactgcctttttaggctacaatccttatgagcgcgatggctggaataccggaaattctagaaatggtgcttattaccgcaaggttgatacgcaattcggacaaatagaaatcaaagttcctagagacagaaacggtgagtttcatcaacacactatgccagattataaaaggcatactgatgttttagagcaaactgttatcaagctctattccaagggcgtcacaacccgagaaatcgctgatttgattgagaaaatgtatggcggctattattctccagctatggtttccaatatttctaaagaaatgattcccaaagttgaggcatatcatcagcgacatctgtcagataagttcttctgcgtttatctcgatgccacctatattcctcttaagcgggtcacttatgagcgcgaagcagtttatatcgccatcggtatcaaacctaatggtcataaagaagtgattgactactgtattgcgcctactgaaaatattgagatttggagcgaaatgctcaaaggcttcaagagtcgcggccttgaacaggtagagctcttcttgtctgacggagtagttggcatgaaagaggctatctgccagtcctatcctaaagcgcattttcaacgctgcttggtacacgtcatgcgtaatatcagtgccaaaatgcgggttgacgatcgaaaaaaagcactggatgaattcaagcagattcatactcagtcaaacaaagaaatggctgtacaggtgctgcatgaattctatcaaaactgggaaaaagcctacaaaaacgtagttagagatcttagacaggttgagcctgatctgttaaccttttacaactatccgccagctattagagcttcaatttactcaactaacatgattgaatcctttaacaacaggcttaagcggaaaaccaagcctaaaacagaatttccaactgagcagtcgcttgacacctttattggagttcaggcaatggattacaatgaccgttactttaacaggattcataaaggatttgggcaagttcgagacaccctagaatcctattttgattaaaagataaataaaaaagtcaatcaacgagagagattatttacacaaacttcttgacagtctcttcgatttccatctatgattaatgatgtaattgaaggtgttacttttggtactaaagttaactggatcagattttcggagctaatgattggtgcagctattttaattttattaattgtctggtttacaagatcagaattacgcatccctattcaatacgcacgtagagcacagctaactggtaaagacagttatttgcctttaaagattattgttccaggggtaattccaattatttttgccagcacgattatgaccattcctcaaactattttaatgttcttcaatgcaggtcaaaattcttcttggtatcgagtagttcaaacattctttacgttatctactactagtggagtaataatttacgggcttatgattattttctttgaatatctttactcaattgttcaaattgagcctgataaatttgcggataatttagagaagcaagaagcttatattcctaatgtttatccaggtgatcctactaaggaatttattcaaaatatgttgaattacttatcattgccaggttctttattcctgatgtgggtttcaattattccattattggtagcaaattcagtttcatcaagcctacaaattggcttgagtggttcaagtatcttgattattactggtgttttgattgaaattggacgtcaaattaagggactgaaattaaaacgtaaatatggaacatttttaagtacggactttagtttagatgattaaaaaaattaagaaaaccatcagtggaatttgtctagcattaatctttatggtggcagttattgtttgttttgctgctatacgatggaatcgtgaagttaaaagcagtacttatgctgaagcaataaataatccagataagttgacgatactttatcgaccaatttgtcctagatgccataggacattgcctaggctatttttggaacactgcttggatagtaaaggtgagtatcttttaaatgctaataaattgtctaagaagcaattggataatttagagtgtagggtcacaccaacttttaggtacaaaaatgttagctacaacattgatgattatcaaagaatagataagatttggatagatagtcattagtattctattgttaccaaattagggcaaaaaataaaggattggttctagtttaactagaaccaatcaaaaaaagggagaaaaatatgagcgtaacagttgaaattaaccaattaaccaataattcttcaaaattggggatttttattaatgatcgtcctgtatattggacatgtagagctttagtgaagaaagatgatgctattgatcataattctgatcactatatgcgctatgtagtaggtttatctttattatctaatttgattaataagtataccgatttaaatgtacccaaaaatgatgttaatagggatgcatgttagaaaatattaggtcaatgatgtcaaatctattcaactgccatcattttgcctaagaatgcgtttgcttgctgttcaatattcactaaaaaccttttaaagcactccttgttttttagaaaacaagaaactataggacaactttgcatcagcttcaaccttgcagggcaagcgccaactattttcttatttaagcagctgctcaaataagagcagtccacttaactgggcgtaacactacgcccgctatcccgttgacaaagcttgttttcgggaatacttttctgattatctgcatggcaccgttaatatccgcattgatcaaggtgccattgtttgtcttgaacaagcctcgctttattctgcgatttactgggcttttgccttgtctttgacggttcttattgccgttctcccagcaaggcttttcattatccagggcactggtttgactagtgtagctttcattagtcctaatcacgctaatcccagccagattagccttatattgaatcatctcaatcatgactttatggggaataccaataaagttctgattgtttttctttcccatattgctggatctcttccatgacttattgttgccaatgacaattgtatttgcctcacagcttagcgcataattaacgatacgcttagatgctttgtgagcaaactgtctaatcttgtcatttctccatacagtaagtcttttcattgctttggtttcctgataaacaggtttagggccttgcttggtattaataatactttctaattgatggtattgagcctgcagcttcttaagtctggctctttccttgttatagtactggttaaccgacttaagattgcggccattgattaatagtggcatattttcagtgtttgaaacacaggcaaaagcattatctactccaggatcaatgccaatgtatctgccattatccggcagataattaatttccttattaatcttatattgaacaatcaacttatagccgccgtagacaggcttaaaggctacccgttggatcttttttacctgaagagccagttcaacttttatctttaatttaggtatagtcagatagccgtcttttactttggcgttttgattggtcacaaagaaggtatgacgctcctttttccttaagtatttaggcattctaggcttacccgtaaacttgccaggattcttctggtaagctttattggccttaaaccaagcctgccagatcgtattgacctctttaagagtctgttgggctgactgcacataccccagctcatgatagagaatgcattcacgcgctttatatcttttcttaaacatggaatcaagctgctcatagcctttaacatattgcttatgaaaaagtccttgacgcaaatcatacaaggcacggttatatagatcatgagccttgtaactaattttatccaaaatattactagcgggaatgatgtattcactgcaaagatgagtatattgggtagaatttctaggcacatttttagtctttttggtcatagtttcacctcctttaaatagtttcgagcttaatcttttttatgcagagcatcttcgatcagcttgcgctctgttctgcgatgcgaatactcacgcattgaaaagcagtgtagcaggctgataatttcttcaaacaattcctgttcatccgtcttaggattcgcttcatcagaaacaacttcaattttagtattgtagttcttaaataaatactcgaacagttcaaaaccaactctgcttaaacgatcttgatgagtaattaccactctttctacttttccatcaataatcagatcgagcattttaaagaactgtttgcgatccttaaaagaaataccacttgcaatatcttgataggatccattgatttcatagcctttagcaagacagaaatcctgtagctcctgcatttgattggtcaaatctgatttttgtttgtatgtcgaaactcgaccatagattactgtcaatcgtttagaacggccattctttaagaaaaagaccgaatcatcatcaaaaatatattgtcccgttggcagcttcttggcttttaaggtgccattgagacgataccttctcaaagtagagcgactgatttgaagcaattccattacttttccagctttcatagtttcatctccttagtaaatattatatcatatatacccgcaaaactaagagaaagcataaaaaataaggatttatccattcagataaatccttatgaaataattgaattaataatttctaactatataaaaaaacattagatgaaggagaaaaagctttgtttaaacgctttggacatgatggagattttgataaacttatgcagctttgtaaattaactgacgaaatctctgataatatgctaaattaccggtatagtgttgatgggccagaaccactcatagactaaaaatacacagtagtagagtaaaaagagggttaaaagcgctaagaaactaatatttagtgcaaaaatacccctttttttatgcttttacatgagtaaaccatcttaaaagtccataaatacaaggtttattagctgaaaaattggttttattttaagagaaggtcttttgataaaactagttaaatttgattaattccattgttggtattttagctcagttggtagagcgtctgactgttaatcagaatgtcgtaagttcaagtcttacaggatacgtaaaaattagaaactaaggattgttaaaaaatccttagtttttttggttaatcactgaattcgggaataatgctacactttagttgtagaaataatttttgattatttttattttgattatcatcaatttatggtttaaattgatttgttttcaaagcccaaaaagtagggcatgtcgattgtttattaatgcttttgcatttatacgatgtttattttttattagttgttctaagatattggttttgtgaccaatatctttttttgtgttctaggaggacaaaagatatgtcatggattaaagttgtaagtcttaatgctaagagtggggaagttgttcctgaaatcattgacaacaataaggaaagctttttaaaagctcttggtagtaagcgaattaccgataaggatgttgcaattttcgagtttaaagttggcgacaagaattactccatcgtttacagaaaatcaaatcaagctcctaaaagatcttctaagaaatacaagaatgtatctgctgtttctaaaaatggtcgagttgagcttcaaggtaatttagtaattgctaatacaaatgataagggtcgtgcttgttcactatcggatgcggatattgataatattttggataacaaggttacttatcttgtacctaagccactgagtagttttacttctattcaaattaatatgattgataacgcatttactcgtgcttaccgtaagtatgttggtatgtaaaaaagagagcttttctttggaaaagcttctttttttatacaaattaaaattattatttgcaaaaccagaactaagctttacagtcattaaaataaggagctgaaaggtgaaattatgcgtgaagaatcattagctagctatttaattagcagctcgaaagcattggaaaaatatgtaattcgaccagtagatttaaaggatagtattcctaatatattctggtattgtcctagcttgttggcagttactaatgggaaaaattgggttaattctaggcttgaaaacatgcagtctcccaagctatccgagatagttaattacggtgtaattactctagatgtcacttttgacatccttgaagcgggagacaatcgcttgatttatgaagatacttatatgggtattaaagttaaaccaagtaagtatagtactggcagattaattccctttagcaaatttaagaatagggaatacaaaggaattagctttaactttccaagattacttggaaaagattacttggccattataagtgaaatttggcacataggatttttctccttccgaaaacaaacaacttttaacatcatagttagagaaacaaacaagtctaagatttccaatttaaatcgtatcgccacattaaatagatttttatatggtgaaaaggataaaatcctaatttctgatgaaggcaatatcaacgaaattgacgataatgtaagatttacttctattgcagataactataatatcggtatgcagtcatttacgtggccaagttctccatacaagcaagcaattagatttgatcctatggctggaattgcgtatctttcgagttacggatgtagcaactcaaaaataaaaaatagtttgaatatgatctcaacagattcaggagagttgtctcaaaaatggttaaaaagcaaagaattcatttcctcctataatttaaataaagatttgctatgtgctaatcttagagtttgcaatagtgctttaaaaagtaaatctccaattgttcagtatacttattcaattaacacgacaattaggaatttaagtccttttgaagtcatagcattaaaaaagtatggttattcgattgtaattaacccagagccaccaattgctgatttaactcaaattggattaagtatggaattacctaaaattatttagaatgtcggaagagagtagttaactttcagtatctatctttgattaaaatctttgttttatgcaaagaatggcaaaaacattggaaaaagtgccaaaagtggtcaattaacccagtttaataaggtaaatttctaatctaaattaataaaattattgatcttataactttttgaatgtcttagaatggcgctctcagcattaatttttatgctagtttgaaaaataaattatcttaattgaaatctacagatttagtaagtttagctattacgaaattcagattctaacagtttaattttgaaagtaaatcttgttattgcaactgcagtttttcttttttaggattgccttgaattctaaattaaagatctaagaaatactctgttcattcgtatatgtaacgatttaactttacataaagtgagagctttaatcaaagataaacataatcaaaaatatgtaaagcaataagctgatgcattcaaaaaatatataattttttcatacataaccaaaaacaaataagcatctaagaagttgccttcttagatgcttatatattctataaactaaaagagtgaaagttgtttagaataaaactctttatactgactacttttacttaaacttcccttttgagtaggtgttgaagtatccagttcaagatgattaatcaaatcatacttatcagtagatttaactgcagtatgatttgcctttcttactcttctcttacgtttcttgttctccataataaataaatgactaatatcatcatttgaaagttttatatcaaatgcatgaaaagcaatgactttagttagataagttaaataatgatcatttagccaagcttcaatgacatggattaacggaacattaatcacataattaccataatcaatataattattatacagagaatcaaatttatcaaaagtaggcgttaacttggaataatcaccaaataataatgcctgctttgcatcaaacaatttatatcgaaaatcattcggttttctttgaatattgtgtttattaaaccattcttttaggaaccgattattgcataagtaaatgtccctagtaatacctgagtaagccaaatcattcttttggagaatagcttttttaacatcagagaagttgttaatgtttgaatcaagatgattaaacatgctttttatttctcggctgttaagtatttgatctgcacttaatttggaaacagtattaaaaattaagcttctaaagcgaaaaatctcaattaacttttgtgcatttataaattcaaaacattgactatcatattcatgtggcatttttctgttgtagaagaaatatctggaaacagaaaatttatcttggtcaagcttaacgtggtcgtcagcaatcacaatatgatgatctaagctttcattatttgaagagtcagctatacgatactgaactctaaaaatatgtttcagccaactttttgatccatcttgaaacatactatcttgaatagcatttattgtttcagatgacaattcattagttgaaagtgaagcaattttaatttctgtgtcaccttcagctaccaagttggaatgtaatgcagcttccaatatgtattttaatgaaccaacaggtgcaaataaagttgcaattgccttcgaatacacttcaaaaatatttttaaacattaataaataatctccttttctttttaccaaaaaagctcagaatcagataaacgattctgagccttatttaaaattagaacaaagataattgcttaggctttgctgatacagagctttgctttttatcttcggtactaatctttttatctttagaataatcaaaactaaataaattgatctcttcatagtgttctgtagacttagtaagagttacagttaccttattgctatcactcttattagttttagcgacaggcttcttaagagcagatttagtagaggttggaatttcagttttagcaacactcttagtatctgctttttcttctgctttactttcaaagtcttcaaacagactatcatcatagtcatttagatcattattatatttaatagcttcaactttctcttttgctttatttgccttttcagcaaaatcaggatgtgaagtagcccattcattttcaaatttagtaatttgagcagtgattttttctacttttgcatccccagcaataagtggatctaagatctttttcttttcagacaggtattggatattagttaatttggcaaatgtacttgaacccacaccctgcttaataatattccgcttcttgttgtaattatgttcccagctctttagcagtccaggtaaattaacaacatagttacgaattcttaaggcgtaatttaggtgaaggaagtcagtcaaatcaacacgtaatggataactccccttgcctactaaaaagatagtagcacaggtgtgtaatccataagtaccagtagttatcttagaggtcatattgtagccagcttcaattgacaagtttgcaattttagcaataggcttattacccgtatgaccagcaccagcatatgcagcagccctaattgcaaagaataatttcttatttgcttcacgagatgatttaaatacttgtccattattaaagacaatatcaggtgctaaaaggctgtgtttaaacggcttagtagtagctatatcttctttaagacgatcaatatccttagcaagtactggagcttcaactttgcttctttcgtaagtacggacatcttctctatagttacggtcaaaagcatgtttttgattaaccagtaaagtcaagtcattatcgactttcatctttagctttagataagggttttgtgttgcaatagctttgaagtctgatgcagtcatagtttgtgaatcaacatcatgcatggctcttattggagagttattagtcataatctgagtaatatactttagcttgttttcttgaatttgccacaagtaattgtcgaaagaaccagtagtaatgtagtgatagatttcaacatgacagaacatattgccttgacggactaggcgtccattgcgctgaatgatatctgatggtctccaaggcacatctaagtggtgagcagccttcattctagtttgaacgttaagaccagtaccacccttttgcgttgaaccaattagaactcgaatatcaccagcattaacctttctttcaagttgaattcttgcctcatcgttagatgcttggtgcatgaatgcaatttcacttacagggatgccttttgcaaccaacaatttctttaattcgttataaacgtcaaattgaccggctttaggagtacctagatcagaaaagataatctgagtacctttaactttagtagttctcttccaaatacgataaacattatcagcaacttggttcaacttagttgaatcatctgctgaatatttattactaaataaacgcatatcaagtgtaagcttgcgagcttcattagtaattttaagcatgttatcttgatctggagtaacttcatggtcttgaatagcatcagtgcgatcaatcaactcttgcagtttagattgctgagcattagttaactctgacttaataacatatttagtagctttaggaactgataaatgagcgccatcagccatttgaacatcagcagtgatatgataaatattcattaattcaggtaggttaacaaatcgttcaaaacgtttaactggtctatatttattacctgttgtatttaattcaagttcactacgaatcttaccaaatgagccagcccaatcatcaaaattagcaatatcaaatttctttaaaatgtcaggctgaatgtaattcatcatcgtccataactcactaatagtattagatacaggagtaccagtcgcaaagacaacatgaccaaaatcatatttattttgcaaaagtctaatcttcattagcatatccatagctctctttgaagtctgactattgatacctttaattcttcctaaactagtagcaggagcaatattcttgtaattatgggcttcatccacaaaaagaaaatctacaccaagttcttcaaaagttaagaagttgtcttggtttctaatggataaacgtttgatcttattagacaaagcttttttgtttctttcaagttgcttaacgctaatagattctcctctgtcttttaaagaagcaatggaattttctaagctatcaagcctatcttgaatgaaattatgttgtgcttcaacactagctggaatcttttcaaattggctatggccaataaccacagcatcatattcacctgaaatgattctagctaggaatctcttacgattcttactgctaaagtcttctgcagtagttattaaaacatttttagttggatagaatttaagaatgtcttgactgaactgagaaactaagttggtagggacaacaaacatcggtttattaactaagcctaaatccttgagcttaaagccagccgaaatcatggttaatgtcttaccagtacctacttcatgagctaataaagcacgcttatcttcaataattcgttgaaccgcatttctttgataaggacgtaaatgataacccttagccagcccattaatatgcaagcgtgagccatcatacttcttattaacgatacgattgtttttattgttataagtgtcttctagttctttagaccaggtagcattgttagtaatataatcagtaaacttggcttcaagctttttctccaagtcacgtagcattgcagtgctagtctcatctacttctctaattggcttatcgttcttgtcataaccagtgatcatagtgattgttggctgtttagattgcaataagtaattaaaaatggtgattggattatcatagccgtttagtgcttgaccatctctttcaatcttaaactcgttagccttagttgaacattcaacagagtaaactagttcggcaaaaggctgttctgcaattactcttcctttaggtgtatgaacaattaaatcttgatcttttgagccagtaattgaatcattaaaggtcttattagggtcaaagaaactatctaataagaaattagaaataatcttatcgggaatccatggcgaaccaatgtgaaaagagatgtcagcaatagtaagacgcttaggcaataccttttcaattagttcaagataatgctgccagttagcagcaaaatcattgctctcgattaattctttcagtacatccctcttggtgacaacatccccagaaagaaagtcttccttggtgatatattcagttttacctgtctcattgtatttctgcggatcaataatgatatgatcagctaactgatctatgatttcttgtttagaatgacctggataaatagttttcatgtaagtaaagtccatgccacgagcttctgaaacagaagacaataaagcatcaatagctgaatcgacttttttgattactctatttggtctaacagtagcttgcttaaaggctttgcttttaatgtagacttgtttaccggttttaggatcaagaatatgatcctctaagctttcaaccaatgcagcttttttatcttcacggaataacttagtattcttagaaagattaattgagccgaagttggccgcaaaatgatcataaatatcattcattctctgcaataaaaatttgaactgagtatcatactcaacacgattcttaccatatttaggactaagctgtaaattaattaacttttgataagtatctcttaaatcaatatagctttttagaatgctagtttctttagcagaataattagtatagtaaaataccacatgcttgatacaaccagcatatttaccacgcttattaggtttagcagatacgtagttatcataaattctcttttggccattatcagtttgtttacgatagtctgattctctacttgctgattctgaagtacctacatattcattagtagatccatcagtgtagtaagtaaattgttcaggcttgccgtctttgacaataccatcaattccattgaaatagataataccgttagcataaccatattcaaacaatggtagttttttgatcttatcaggcaaggtagtatctgctagcttgccttcttcaatttcaaccctaccgctgtcaacagagtaaagatattgagcaggtaaaatgtgaccaattgcagctggcaattcatttaaaaaatcacctttgtctactaccgtaagagtagcaccatgataattttgaatttggattgagcctaaaacttgttgtggctgactgataaagtaggtatttaaccatactcttctgtctaatgggtattgggatgcaggcataaaagcatcacccaaagtatccaaatcaccacgcatgtttttctggaaaaatagcatatcagttgtaacttgggtgccagcgatttgcttgaaaacatcagttggcattctaacaccacctagaaaagcaactttgttctcaattttctcaaggatattgttggttctcttatccattaaccctgtactcgtaataatagcgattaatccgtagtcacgagtaacatcaacagcttttttcaagaagtaatcatgaatgtagtatgaattattgccactatcatcaagtagacgagtatccccgaaaggaacatttgtaattaccaaatcaaagtgagcgcctttgaacttaacatcttcaaaaccttttacaaaaatcttagcttctgggaataattgcttagcaatcatccctgtaatggagtctaattcaattccatataagttaacttttccccgtagttgttcaggcatagtcataaagaaaataccagtacccattgaagggtcaagcacattaccgtgggtaaattcagaatcatcattttctgagtcagttaccttttgccacatagccctagcaatagctgggttagtgtagtatgccgttagagatgaagctttcatattttggtattcatcgtgtgaaaccagcgatttaagctcttccctatcattttgatatttaggattaaattcatcaaagaattcattagccaagccaccccagccaacataagtagctaattttgcttgctgatcagttgtggcttgtttaccttcttggtctaattctttaaccaacttaataatctcaatgttgttcttgatcttgtccgcatctctcttggggaagaaatcctcattagcatctgcaggtaagtaataattttgcatctgtaaaaatctcctttgttaatttgaaaaacaaaaagcagccactcttcttgtatgagttaactgctttcaaacttaagttaattattaattattcaatgtagttaaatggtttcttgctaacaatgagtgtcccttcattgcctaaatctgatgcaacaatgcttgaagaagcatcaaagctatagcaatcaatttcgccagaagacatattgtcttggtataatgctttatcagccaaacctttaagttctttctctgagtaatctttatcccaatcaactttaagacctaaagtagcaggaatatccaaattacctaaatcaactactttattagaaaccatttcagatagaagtggatgcccttgtgacatgtcttcacatctgtaacctctttgctttttcataatcaattctgattcttttgacatctttgctataatcattttcctcctaaagaaaaaagacctaagcgacatgcttaagccttaaattctattaattaataaacaataattttttaaataaacaacaataaatagcctaacaatatgcctacgaccaaaactcagaaactgtcaaatcttttgtgtaaacagatctttctcgtaaattgattttttaattatttatttaatcaaagtaggattctaaggtgtcctgaacctgaccaaagcctttatgaattcgattgaaataacggtcattgtagctcattgcctgaataccaataaaagcatcaagcgactgttcagttggaaactctgccttaggcttagctttgcgcttgatcacattgttaaatgattcaatcatgttagtcgaataaattgaagctctgatctgcttgggatagttataaaagaccagcagatctggttctatgtctttcaagcttctgataacatggctgtaaaccttgccccatttggtatagaagtcatgcaggacagctgtggcttcttctttgtttgtctgttgatgcacctgtttgaattcgttcatgatcttttcacgatcgtcgacgcgtactttagcgcagatattgcgcatgacatgaaccaaacagcgttgaaaatgagcttttggataagtctgagctaaggctgttttcatgccaacaacaccatcagaaagaaaaagctcaacttgctttaagcctcgggatttcatgttttgaagcatatctgtccagacttcaatgttctcgctaggcgcaatgcagtagtcaatgacctccttgtgcccattaggcttgatgccaatggcaatatagactgcttcacgctcaaatgtttctcggcgcaaaggaaggtatgtcgcatccaaatagacgcagaaaaacttgtcgcttagcttgcgtttgtggtaagcctcaacctttggaatcatctgcttggaaatatttgatacctgagctggactgtaatggctgccatacatcttttcaattagatcggctatttccctggtggtcacgcccttggagtaaagcttgataatcatgctttccaagatatccgagtgctgcttgtagtcaggcagcgtgtgctgatgaaattgaccgttgcgatcccgaggcacttgcacttcaattgggccaaattgcgtatcaactttgcggaaataagcaccatttctagagttgccagtattccagccatttctggcatagggatcatagcccagaaaggcagtcaattcagcttctagcaagttattaacagcctgttgtagttctttgcgcaataaatcatttattttgtctggattgaatagagcttgagcaaaatctttggtaaaatcattcatgaaggagttcttctttctgtatgtgttttttttgttcaaaccaatcatacgagaaaggaactcctttttctaatgtttaaagaaataaatttaaggaatcattcatccttacacaaactattttacagtctcaaaactcatatacagatgagttgaatcaaaataaataaatcaaagatttacttacgactatattatacaaaagatagttttgaattagaacaaaagctaaaaagaagagcttttttaatgagcctgttaaaataaaggtaagaattatatatcaactatgctaaaaagctcagtacaaaactgagctttttaaatattattcttctagttttttatttaacataattataaatatgttgattagagcagttctttttcaattgtacgaccaaaatctttaatttcatcttgatgttctgggtaaacactagttaaagttcctaataattgaaaaatcacagatcctaatggttcttgatattccttttttaattttttattgaaagcactttttacgttggtcatattattttttaccacttctgataagattccgttgacctgagattgattatcttgtacaaattcgtctactggtaatggtgattccccttctacatgagaaaatttagaaatcgcatttttagtagaattccattgtttgcttggataaaaccacttgttcaaatcaatggcagaaaaagctaattttagccaatttgcatttttctcaatgtgttctggcttatcgtctcctctacagaaagttaaaatattctttttaacctcagcaaaatctgtataagaaatggataagtaattggttctcggtgattcaacaaatatgcaatgccaatcggaaccattgttttgtacaaatttgctgactctaatcattttatcttggatcttagtttcatcatagccacgataaaagcctaaatagccaaattgcgataacttcaataaaattgacttttgctgggtttctttattgtaagtacccatgatcaattgggtacgcaacgtcttggctttttcaatcattgcgtcaattagactatttggatttagatgcaattcttgacatatatttgctaccagctccattaaaaggattgctcttttatcggtatcttggcaataaatggtttgattatctatattagagtaaaaaatgtaattaaagagctttttgtctgctcttaatttctcaagcttttcattcatttcctttaattgcttgttagcaaattgaaccttgctttcatcagtaggttgttctaaatgattaaagtcttcgaacaaagagcgacaatgatctaaatcatattcaaaatcgaacagttctggtctcattttgccaatggaagatttaagtagttccaaagtggcagagaaattaaattcacgtaaaaattgttcttgcaacagcaaattaagtaagtcatgtgtcaggcttttttcgtgattatgatcaatcgacttgtaaatcattccctctctggaaccttgttctggcaagacatacagtataaccgaattagcccaaatctttttgacatctgaaattatttcttttaaatcttgattcattttcttattaattagattagttcttaactagcctaataatcctttctatttacttttgtatttttataatacaaaatttttagtcttcaaaacgaaagttgaataaatattagatttcaaagaaaaataagcattatttaacttgaataaatgcccaatgataatgtccagccgttttttgctttcctcgacaaaccgcactaatatattgcttatttattcctgttttttcctgagctactgttaagctagcatatttttccttagtatcaagattaataactggttttaatttagattcggatattaattttataccacacttggggcatcctgcatgcattcttgtgcgactatctatctttgctttccactgataaccacatttctgacatttccaccacaccttatgatcagaatgaggaaagtattctgaggggcttttatcattttgaacatcccattctagtagtaaatcacgtctattatgtttagcgcaccaattctccaaatcattgtagccttttaatactttctttttattgcaaatcgggcaattgcactttaaaactgttctgttataaacccccatttggtattcatgcccttgaggacatttccaccatactttctttggcgtaccatatgagaccatacttggaagaagctgaccatttcttgtgggatgccactcttttgcaatatcagggaacaattttaaaagagatttagattttcttgatttaatatagctttcgtaaatataagatgcatcttggcctagattaatctttacatgattggatttattcaaaaccttaaatacttcttgaatacttgaagctaaagaaacagattcctctggattcttttctatgatatttacagaatcattaagtgcaggtaaaccatcctcacgaattctaatcaatctaatattattttgcctacaaagattatctttttttgcatctcgctttaaatgtttgcgatgccattcgaagccgtcatattcaatggctgtacgtattgatggaacataaacatctagttccattccaatagtattttgatcagaatttatagcatctggaaactcctgctttatataaaaatatattgcttgctcaggaaaagaagtatgattttccttatcacaaattgggcagtcactatggttaataccggttttattgtaaggataactagaatacgaatgaccaaaaggacatatccaccatgcctttttagtagtcttccataaaacatttgatggatttaaagtatttttactataatcccattctttcataagacgtggacatctagtttttaaatcgttaaaccctgaatatacttttaagtcatcaatataggggcattttctattattaattctttgccttaacgttaccttccacgaaaagtcaaaatgatttccagtctttggatcatcataaggagtcaaccgccaataatattttgagcccaatgtgatgacatgcgaaggatcaaatttatttttcttttcatcccattcagcaaatatattaggatattgctttgataatttttacttccttaaaagtgttagttagtatttgtagagtttgttttcttttcgcacatgtagatttacgagtatcattttctggtaaatcctgaaatgctgacattttatatcctttctaaagcaaattggagaagtggatttataattattagttattaacttcaaagtacgaactaagtcttagaatcgccctctcagcattacaataaattaaaattaacttgatcaagtaatgcttctcgtctttcttgttcaagacctaaatatcttaaagtcattgcttcactggagtgatttagcattttcataactaaagcagtattatgattagtctgctgataaaccataaaagctcctgtttttctcattgagtgtgagccaatccaattaaccccaattttaagcccggtctgatgacaaattctataaaaactattttctcttattggaacatcctcacctaatctcctagaacttggaaatagccattcagaagaaaacagcttcttgtagggatgcttcttttcatattcttgcagccaatcatagtaatcctctaaaacatccctaactggagttaaatataatcggttaggcttttttgtctttttgtcaacgatataagcatttttcttaactctgccattggcttgaaagacatcattctttttcaaagctagaacatcacttacccgtagtaaggttgctttaccggtttgaaatatagcatagtttctttctcccatactagtatcttcacgtaaatgtttcaaaaacttctttaaaattattggatcagtaattggacgagtatctttatgcttcaatttacgtctccttctgtcaatttttatattagtccttgatatacaagtatttcgtcactctatgttgaataattagtctatagctaattatactacataatcaacacaccccaaaattggcatagcagaataatgcatgattagatgtactatgtagaataatcttattattctacatagttagaaagtacaaaaagaatgctaatttcccataaaaataagaattagcattctattgcattaaatgattaaatttaacctctgcagtcgaacttgacctcagaatcgtcctctcagcataattgaactagccttaaaattggcataattgttttacctattctagtcccaccatatcattcacgaaaccttgaagtttgtctaatagctgaatatttacgtgattaacaatttctccatttctagattcaaagtcaaaattctgaagttgccataaaacaacataaccttttactccagtgccattactgcctggaattaatattggctcgtaatgtgggttgccttgatatttatctgaagtagtaatcggcatccctataaacatatgtgttgatttattataggcactggtactcattaccacataatgtcttctaatattacctttatgcggattatggccacccatttcatgtccggaatgaggttctgcatctgctttaacaatatctccctttttcggataaatcattaatcaactacctcacgtcccactggttttactgattgtagttccacgtcattttctatgtctttttgataatcataattttgccattctttggttgcaaaaatatttttctttttcttcacgacaggtgtaaaaactatattcatcccctcatttttcacagtatactctttactagtaattattatatctttaggaactgttaaagtttttgaatttccaacttttcttaattttacagtcatagttgtacgcctctttcttttctgtgcatatttagtatacacaaaattacaaagaaagtaaattatgttttagcgttatatcaatagatgggggagatattctttgttctttctcctagctatttgtccttattgcataaaaaatctaaatattttgaatacgcgtggtgctagttaaatcgttttagttaataaaaaagtccaatcttgttagactcgacttgtaaatagtaataatagaaaagagtctgatctgattgaactgccttaagcttaagcgttttagccaccatttacaagttagttttaaagatttagtgataatttgtcggcactggtatcgtttgtatgcaccggctgagtttactcatcggcgaaatattgatcaaattaaaactacggacagtctgattttggctttacttatctggcaagctaagacaggaattgaatcacaaagaagattctgtgaatgtttcaattgtttatcacactcacgttttaatcggcgttcacgtcagctattgcaattgatttatcagatacggcaagaaatgaataaaaaggttgacctgaatggacatttcttgatcattgacagctttccggtacctgtttgccaaccaattcgcaactatcgtgctaaaatttttcgcggttatgccaacattggttataaggccaccaagaaaatttacttctatggtttcaaagttcatgccattgttagcgatgacggttacattcttgattatgtcgtaacaaaagcatcagttcatgatgccagggagacagttgaactgctggaaaatgcccatccatctaattactatcttcttggcgacgaaggctatttaggcaaagaactgcatcaacagctaaaacaaatgggttatgaactttggacaccatatcgtaaaaatatgacaggagctaaaaagcacaatgatcatcaattgatggctattcgcagaacaattgaaagcgacttttcgcttctgatctattacaatgccgagaacaatcgagcacgtagtctgataggctttcaaagccggttggaaattgcaattttagcttataatttggcttattgtctagaacgatttaactagcaccacgcgtattcttatgtctacgtataataaatttaccgagtggtgttgcagaccaccgagaatcatagtaatcagtccaactaaaggtatgattataaacatcaatattttcatctgtatagccgtaatgccttaagatttcttcacaattccaataaaacagttgtgataatgtactagtagggtcatttaatttagtaaacgttggatacttcttaataagttcagcacgtttcttatcccagctatctttaaggttattctgctcaaagaaattattgaacttgtaatctgcaatacccttggtagcatgatctttaacaagtttatctaagtattgatcaattaatttaggatcaagaaatttcaagcattcattttcaacttgattaaattcttcttcaaacttctttgaattttcatcactttcttttttcattaatttcattgccgattttagtgctatcatgttttaataccttgctttcattaagatcttcatatttttatcttcacacaaagcataaaaaaagagttgcaatgtaaatacagctcttttatcgcctaattcatcaatagatgggaaggttgtcctttttcctaactgtttgctcttattgcataaaagcttctaggactttatacattctctttaccctttcagttctttgaactaatgcaaacttaattttccctctagtagaaaagtaactttttccaatactgttatctttttattacaaaaaaagaccatacaagcatataacttatatggccttaaaagccaaattaaatatattgtaatttaccagctaaagaattatcttgcatcagtaaagttagcaatttcttagcagatttatttggctcgctacgattgctttcccaagcttctactgttcgcttagaaacaccaactaaatttgctagacctgcttgagttgtcccaatctggtgtcttaatgtcttaatagttttggcattaaattcgactttcacaggtaatgggacgtctacaacttcgacatggctgtcatcaccatttacataatcgcgacaaatctttaatgattctaaaatagttgatttacccatcattatcgctcctttttaaagcttttaataaaagctttaatctcatttttctcggtatccgttaaagaagacttctcttttttcccatagaccgccaaaaagaaagcacattgctctttctcctcaaaaacaaagtaaatagtacgataactgccacttttacctttatttgatttttttggagcaaacctccatttaatagctcctcctgttccttgaataatatctccaggaaacttattaccgtaactattaagcggagctttcaatacataatctaggaaattatgttgtaagtcctctctatcttctaagctcaaacctgccttactccattgtctcataaatggatcaggatatatgaatctcataatgtcctctttctaaagttttactaaaaatagtataccataaatgcgcttttagatatacgattatatcgtactattgacattataattcaatagtactgctcatcaaacttagtaaaccttaattggcgttactaagttaatgatctcactttgcttatccgttaagggattaaccaaaaatggtcttaacggttttgtaaatgaaaatgcaacttcatcaattccatcttgcttataaacacgaagaatctcataaagataatcagggtttgcagaaatttcaagcttatctccatcaatatcaatagatgttacatcttgttgacagttaccgtacgttttagcattacttgaaagtgaaatgctcttttcagcaggatcaatgttaaaagtaactacgttgttttctcccgaatgagaaataagacggacacgatcaatgaactccataaaactttcagtatcaaccgaaaacttagtagtttcatcttgtgggataagtgcatcaacttgaggatactctccttcgatagtagttgaaacaaatttaatctcgtcacctatcttcagaataaattggtcgtgattacttgataattgcaacttactttttacatatggtaacaaagtttggataaacttaagcgtattaactgataatgtagtatcaattttctccttaacgcctgtattcttctgaatttcaaaagaagacaatctatgtgaatctgtcccaattgctttgatactatctggcttgataataaggtgaacaccttgtagtatctctcgtccttgagaatcagcagctgaaaatagcgtattatgaatcaaattgcgcatttctgctgcatccatttcaaaatcagattgacccttttctacttctttaggtttaggaaagttgctactatccattgtattaagttcataagatgacttaccaaacttaattgtagtagtaatagtatcatctgattcaatagttagttcatcagttgccttaatttttttaatcatgtttaaaaacaacttagcaggtagcaatacactcccatcactgaaagtagtacaatccttattatctttaagcctcatcgaaattccatattcagaattttgacttgtaaaagtaagacctttaccagctttaacgtctaacttaatcatttgaaatgctggaatagaagaacgttgatctactcctttagcaattactgatacaacaatattaaactttctcaattgttctgcattaacgataaacttcattttaaatacctccaaaattaaaaggcacaacttaagtttagcctttctacaaatactaaaatttaaacaatatcgagtgaataaaacgatttcactttacctttccaaaaataaaaagactattcagcactcgaaccaaacagtcttcataaacaatataaaaattgataaacaataaacagctaaacaactagcttcaaaccaaattcaactgacaaagttgaataaaaatcaagaatcacaaaataaatattcttgactaattaaagtttaacatcttctactcaatttggggtatttttgcaattataactttattctttatccctgaattgtcaaattaagtgcaacagttaggctatgaggaaatatattgcttgaagagttcttctgctgtgtgatattgaaggattcgacgatgtttgcggttaatggcatcagttgcctgttgaacataagcagctgacttatctttcatgcttttgcctttagggaagaattgacgcagaagtccattgcagttctcattggtgcctctttcccatggagaatatgggtgggcgaagtagatctggcagcctttgatcttggtcatatccgcaaactcagagccattgtcaaacgtgatcgatttaaaccaggcaggatgtctgtcaatctccttttgaagcagcctttggcatgtgctggcccgatagtcaggaatcttgataactacttcaaagcgtgtggttctttcggtcaaagtcattaaagcaggctgattcttgcgtctgacgcctttaaccagatctccttcccagtgcagcggcgtttttctgtcttcaatctctctaggacgctgttcaatggaattgccaagattcttcttgtgcaaagcatgaccgctatggccgtgatgacgcttgttcctgcgtcttttgagcttcataggcagatcaatattgcttatgtccagcaagccctgatcaatatagcgatagacagttggtgtgctgggacaagggtagcctggcatagtccttttgaattcaccaacgaattcatcgatgctggtggcatcaaatttagctttaaagcgtctggagagcattctcaaaaagacagcataatgcttcaatggattgcgctgatagcagtttttgcgacgcttctcataataaagctgtgcagtatcagcgtaatagtgctcatacaataaatagctgctgtctctttgcaggacgcttccgcgtttgatttcgcgactgattgtcgacttatggcagccgacttcttgagcgataacagtacgggaagttatgccggaatccagcattgcttgaatctgtccacgttgtacgctggttaattgatgatagtgcttagaaatgctagaatttgaattggtcatgaagatcttcctttcttgatttttcgtcacttcaagtttaggtcttcagggcctttttgtttaacacttagtgttgcacttcaattttaaatccgggctttattctttatctaactgattagcccaattcattaactcttttttgcaatcaatcaatgtagtatctgccagaaatgattctgccgtatcaaatccaataaataagtcagtatcattaattttttcttcttttcctgctgcagtaattggtaaaaaagcatctacatattcatttaattcataaaaatcatcaaaattatcacgatttttctttactaaactgtaaattgggtcagtttcttttagctgaatataacctgtccaccattgtttgctattatccataaaggattctttaaaaatatagatgtttctaccatgataatgttgcttcaaggctaacgtactcatttatctcgtcctctttcttaaaatatataaattaattatacaaaatttatatttggcttataaaaaatactaataaaaacaaaaaatgactaagcttagttagccattctttattcatgatactaattaacgatgcatttttcttttagcacctgctaatcctaaaatacttcccactgttgcaatacctaaaccaagtgctgtagcggtagaagcatctgaattccctgtttgtggtaattcatctgtccctgtgtcattcaaactcgaatcacccgtacttgagccaaaatcattaggagcatggacaataattgatgatgcttcagtagtatttggcgtaccaaccatttgaccattacttagatgacttgcaaccggggatgcaacagttgtggacttagaatccaggtcactatcattgctgctattactacttgaagctttcttggtttgtgaaactgcattattttcatttgccgactgatttgaacttgttaaattatcatcaggaacttgtgggacatttggaactgaaactgacggaacagtagaagtagaagctgatggttcagttgacgtgttagaagaactaccagcatcagaatatgatggcacatacacattgtcattatttgtgttggtacgataaggaacccatacgttaattgtggctactggacttccatttgcttcattgcgtgcaagttcagctaaccaattcgtattatgatttaaatcaaaagttaaactggaaattccctgattacttaccggcaagtaatgtccaccaaagtaattgctataggcaacatgaaccacaccattcttatctaaatagtaattatcagtaatatggtctttaatcaaagtattattaaatggaattgccggtaatgttgcgttattagctgtccaattaccccatgtggtagttccatcaactagatccaaacttccttgacgattaaattgcagtgtaaccattacatctggatcattagtttcatcagcaggatctactggtgcatttggattacccatgccagaaaatggaatcattttaggcccattttcgtaataacctttaacaacttctcttatcgtagcttgttgttggacgatcttctttgcatgggtaaagtatacatataaaatttggtctttaggattttcatcgttatcaaaagttagctttttagaatctaacttattatgataagtcttgccattaactttaattgtttgattgaagttatcatatcttgtatcaagattcttatgcttaccatctagcataattacatgatcaagagtaacgtctttgttaccgttggtagtagcggtatcaagcacataattcttactagttaaatcagcaatttctgaatttactggattgtcaattgtactttcaggtgcatgaacctgaccatcatgtctagttgtaaatttattgccaatttcttttttgctaccttcatcaatataatgaacagtaatgctctccgataagttatatggtacgactactctaataacagcaccatctttaggaatcacatttgaaacagttttggcatcaattaccttcccattaattttcttactatcaaaagtaactcttaaaggattgctttcagtaacaggttgaccattgatcgtttcttgatagtgacttacatctgggtctacatgatacttatcaatatgattatcatctaagccacgaactttttgaggcaattcgatagttggtaatgctttatcagctgaagttaatttccaatctgaccaatttgaataagtatctgcaacagtttctgtattgtgataatgagtacgactgcgactataagttaaattagctggattgctgaaaggataagtataaacatcatttcctttatgtgggccattaccataaacgtaatttactacttcttgaacagttctattttcatcttcaacttttgaagtagtatgagcatcagtagaagaaggctgaccggtttttgactttgaagtagagtcaacagaaggtgccttagatttaactaatgactgtttgttctcaacttgaccagattcgggcttagaatccttcttttgagacttggctacatctaaaatctgttccttagtattagctttaattttactaccagtattcttttcagattgatcgttcttttcttttgaaatgtcttctttcttaggtttggcagcattttgctttctatcctgggtagttgatgacgttacagattttgaatcatttgctttaactatttccgtagtttgcgactcaccatctttaacttcatcagcatgagcagtggtagattgattggtaagcgcaaaagtagttcctagcattactgtcgttaaaccaactgttaattttctcaatgcaaatttttgctttccatttaatttagcattgaattctgaatcatttttatgtttcatatataatataagcctccatttaactagatttttttgattcagttttagagtagccttacccaagatccctttgaaaaatgcaaaacaaagtacaaaaattctcctctaaattgctaataagatttgattttaggtaaaaaaatagcatccctaaaaatagggatgctattactcgtaacttaattaatcataactaagtcataagtacatcatcacttaatggcttgagatactctaagtacccccatgctttaatgccaccaatattctgacgagtaccaaaattaacaatttttactggcctttgccgattagttggaaaagtaccaggattaattggacgctcggttgagtagtaacgatatgacattgcattagtattttgttcttccatgattaactcctttaattagaataaatccatactagaattagtagcttcaggctctttttcattaaataaagaagcaccattagctaatttctgatatattttctgataaaactgattataatcagtaattttttcattgctaccatcagcatgctctacgctataaccaaattcacgtttttgaggatcagcattaacatagaaacaatcgccgtcttgaaaaagacaaactgaaaattcctttgacggtacggccacatgcttctgttccaaaccactgccattagactgacaatagctatttgcttttttcaaagctttatctagcatctcctttatgcgaccttcataataaagttcaactattcttttctccattctttttgcaccgaaagggcctgccccttcttcaagtttaggatcaaaatagtcgtaagatttttcaatgtatcttctttccttaagcactttgccttcccaattttgagcattgcttaagctataatcatgattttttaacatgacatccagatcaaccttatacactttttcttgagtatgatctacattaatttgtagattatctttacatacaccttttaaaattctatttgtaagcattttattctcctaaaataatgaaatctgctgcagaacctttttcttcgacttatcattctgttgctgaactgacaccctagtatcttctgacctatcccttttatggttagtatccatatcataaatgttagggacaatatctgaagcagagaaactatcatattttttagtagcagtattaattagatcatttctgtaatcaaacaaagaacgatagccactcaccgtgccttctgatgtttttttatggaagtaaaaacaatcttgcgtttgatcaacccaaagataaaatttaatatttaaaccaaaagtacaaataggaatcgtaatagttcccattacttccgtcttatcaaaaaaaattttgcctttttgaattgcgttgtctagacattcagtggctcgtttaatagcaatccactgcttaattgtttctaccacatcatatccactaatattagtcagactttgatgtttacctaatatgtcgccttccaaagtgaatttcaagctttcatatataaaaggatcttttccagttacatggtacttaggatcagaaattgacttgacttgatcgttaatcatcgctttcaagtcaacataatgctgagttgctaaagaatgagttacatacaattgaaaattatattttttcattgcttttacgatagattcatttaaagaatcattcaacaccttcaaagtcatattatctgtgcttgataattttgccatacttaaatacttccttttaaaaaaagatcagcaaatttatcaatgctgatcatttatttattaattatcgttttctatttccttaatcaaatcaaatggtactttgtaccaattctcattatcacgccatccagcaagttctagattagcaagttgcccatcttccagttcaatcactgaaagatcggttgctttatttcgtaaaagttccgcataagctttagaatttctgctcttaagctgggctaagacggacttggccactgcgtaaagatgattcaaatttgtacttacagcaattaagcctgtagggaactccaaagtagtagtaccgttttcgcaccaaatgcttgaataatagtcacttactaacacaaaaaattttttgttcatttttaatacctcaatttctttttatcttcaaaatgatattctttaaaaatcgtactttttagcatcaaagtctgaaaagaaataccaactcgataaaatctcttctgcacgatttaagttctccatgttataggcacgacaattaaaagccttgtcgaccaaagtatcttccaagatactgattaagtcgtctaaatcagtaacaaaatcatcgtaccaatcttgataactaatggatctgacgatacctaaattgcttagatactcttcacacttacgcttagttaattgaccccattgctcatgtagcccattatcttcttcataagttttaagtaactttttgaattgtcttctacaataacttctgcctttgccaatttgcttagctaatttaaaattaacttccattatcaaatgactcctctactaactaaaaccttttcttagtgccaaactggtaagacagcaatagcactaagaacaataaagccaaagataattgccagcattactaaattaaaactaataacaatactgagaatatctttgacccaaaatttgatcaattctactttcttttgcactcttcctcctaaagcattaacaaaaaaaggcattgaaaaaatttcaataccttttagctttttaataaaacaaaacaacaaaatgtcactttacatgaccataaacaataaacgcccatcacaattaggaattaggctacaaccaataccaaacaacgatgtttagcaattgaatcaaaatgaaataatcaatttgattacatctatataatacatggaatagtttaaaagcagctattttaaaaataattaccaaattttgagaggacaatctacttactttttaacctcaacttaaatctattgatttattcagtattattgttagtttgttgctgatcctgatcattagaattattttccgtattgttattggtattattactgttttgattaccttgattgttctgattattctgccgtgtttgattactgttttgattctggttattaggtctacgctcaataattactactcggttagaattgccattatcaaatgtggtgttaggattctcctggtaccttctaatgatttttcttggtatccgattaatattctttttcttcttaggtgctgcaggagcatgccccttttgaaataattctcggccagtattaaagtttctagttactacactatcaggcatcgtccagtccatattcaccttatccttcatcaaataactcatcatactcttatataaaagcatagctgaattctgaccactaccagtaattttaccttgtgccaacgtatcataaccagtccacactgacattacataacttctggtgtagccaataaaccacgaatccttaggtgtgccattatatgagggatgcgcctttaattcagcatttgaatatttaaccgttccagttttgcctgcttcaattaaatcgccatctttagcttttaagccagaaccatgagtaattacaccctttaacatatcggtaatcatataagcagttgatttatccattacacgagtacctggagtgtcataattatgaatttcaccagttgcagtctgaatacgagaaacaaattgtggtttatgatacatccctaatgtagcaaaagcactgtaagcacctgccatttgtaacgttgatgcattagcaccaatcgctactgataatccttgacttggctctacattaactccaacttgcttagcaaatttggcagcacgtttgattccgatatcttctaaagttcgtaccgctggaacgtttcttgattgctccaaagcatatctcattgtcatagccccatagtaacgattatcccaatcatttaactgaatatgagttcctgcataagtgtaaggagtatcatacaaaatttgtgacgttggccaatgcttatattgaattgctggtgcataatcaagaactggcttaatagaagaaccagtagatctgccagtttgtactgcacgatctagccctaatgcaacattaggcaaatgtcgaccacccaaaattgcaattacgtgaccattatttggatcaactacagtagcagtggcctgcatttttttattagtgaaaggtaccttcccactatttgctaattgatacagttcatcttgggctttttgattaatatttactgtaatcttcaaattgtcattataagggtcaaagcctttttctcttacttcgtctacaacttccttaatataaggatcatcaattttgcgaagtttagattgcgtatcatgcttataagtcaacccatgctgaatattttcagtaattgccctggaatactgtgcctgagtgattttgccatttttcaacatagcctgtaatactaggtctcttcgatatttagctctagccggcgtaatataggggttatagaaagttggcgcattaggcatccctgccaaaagcgctgtttgtgataaatctaactgatctagttttttaccatagtaatagcgtgcagcggtaccaataccatagatattgtaattcatgtacaccttgttaatgtaatactccagtatttgttgcttggaatactctcgactaacgtgtattgctatccatgcttcttgagctttacgttttagcgtacgatcagaaacgctagttgaaaaagctgacaatttaattaactgctgagtaattgaagaaccacctgcagaaatatcatggccacgaatattactgataattgatcctccaattcgaattgggtcaattccaaaaggctcattataaaaacgtttatcttcaattgatactacagcatctttcatttgttgcggtatttcattatatttaacataatttcttttttcttgtcctaatgtcagtagtaattttccatcactggtatacagagtagaagaaccaccactttgtaattgagcctgagtaacttgtggtgcgcttttagcatagtaggcaaataaccctattccaagagtaaaaattagcaaaaaaagcaaaaagatcccacgaaagatatttcgaactacatgtcttgccttatgatgcggacgtaagcgatggggctgatgacttttagcttcttcattgctctcttcctcttcttgataatcatcagaatcatcaattgaataatcatcttcggtttcaggattatcattatcaaattcagagctatattgatcatcacttgatttattatcgttaacttcacgaggagatattttctcatcatctggcaataaattatttagaccatcataaaaagaatcatttacttcattaaattcatcatttttatttgatcgatcatttgatgaataggacttatcatcgtcattatttctcatgctgaccgccctttcggtttaatatgattctattgtttaattctactgatttatgagatacaaatagaaaagcacatttaagcctaattactgagcttatataaagaactgaacataccttatgtaatacttttgtaataataaccctcaaattgattatttctcaacgaccttgactttggctatattatttagacataacgaaaacaaaaagtctttatgaccgcttaattaaagcaaggaaaggaacttaatagcaaatgaaattatcagtacgacaagctattctatttttagtcggtggtgttgctggagctgtcggtattcaacaaaatagcagtacggcacatgcggaagtagtaacagttcaaaaaaatgacactacttggaagatttcaaaagatcatcacactactgttcatcaaattgttaaagataatcaccttaaagaaggcggttctaaaatttatgttggccaaaagttagatgtaaataaacctggtactcagagtaaagatcatcataaggcacctaagaatgtcgcatatgcagctacaactactaatcaaaataatggcccaaccaataattatggttcatctacacaaaatggttattctgcttctaataccattcaaggctcatcatacaatagccaatatcaagaaccagtttcacaagcacctaagtcttctgcttcgaattatcaatcaactgctactggcggtgaagccgctgccaaagcttggattgcttcaagagaatctggtggcaattattcagccgtgaatgcctcatctggagcatacggtaaatatcaattattgcctggttacttacatggtgattattcacctgccaaccaggaaaagacagcaaatgattatgttcatggacgctatggctcatggcaaaatgctaaagctttttggcaagctaatggttggtattaaaaagtgtttcatttatgcagatactcgttacacgagtatctgcttttttgataggtagggaattaggtaacaatagaacttctctgcctttagtctttttggatatgcaaaagtccgctataatagtaattagtagttaaatgaaaaggactgaattactaatggacgaaaaaggctatgctaaactgattaatactgaactacaagatttaccgcaatacgtcttttactatgctcagcaacctttagcaattacaacgatctaccaatacttaagtgaatacagacgattttttacttggcttcgtactgattctgggaagttaggaaaagccccactttcctctgctactaagaataaaaatgttgaattatctgtcttagagcatttaagagttattgatgttcaagcctacctacgtgatgaagaaactaaaatcaataagcaacaaagtcacgattctaaaaaaactatcaatcgtactatcaacgcactacgttccttatttcactttttaactgtaacggccgatttaaatgatggtgaaccctacttctatcgcaatgtaatgttaaaagttcccctacaaaaaggagcaaaggaatccatatcttacagaaatgaaaaatatggccctatgctttatatgggaaagaaaaaacacgaatggcttgatttcattgataaggactatgaaaatcaaatctctaagcaagccctttctttttttaaggtaaacaaagaaagagacttagctataatagccttactacttgcaagcggaattcgtgtttctgaactagcacgtttgaacttaaaggacttaaatcttaaaaacagaagcgtaattgtaattagaaaaggtggtcaaagggatgcaccactaattgcagattgggctattccctacattcaaaattacttagcaattagaaaagagcgctacaaaccatctcaaaatgagcaagcattatttttatcaaaatatggcaaaacaaaaagaattgctacaaatactattgaaaaatttgtaagtcaatattcacaagcttttcctggtgggcaaagaactaccccacacaaattgcgacattcattaggtacggaactatttggtaagagcagagatgtaatggtagtagccacacaattagggcatactggaatttcagctacagatcagtatattcaagaagataaagctgataagcaaagaaaaacacttgattcaaccaaataagacaaaaaagactttatgtacttagaacataaagtcttttttaggtcttaacatcattgatatgacacgagactgtaaaatagtttgtgtaaggatgaataattccttaaatttatttcttaaaacattagaaaaaggagttcctttctcgtatgattggtttgaacaaaaaaaacatacagaaagaagaactccttcatgaatgattttacccaaaatatggcacaagctctattcaatcaagacaaaataaacgatttattgcgcaaagaactcccgcaagcagttaatgacctattagaggctgaactgactgcgtttttaggctttgatccttatgccagagctggctggaatacaggcaattcacgcaatggtgcttactttcgcaaggttgatacgcaatttggcgagattaaaattcaggtgcctagggatcgtaacggcatgtttcatcagcacacgctccctgactacaagcagcactccaatgtcttggaaagcatgattatcaagctatattccaaaggcgtaaccactagagaaatagccgacttgattgaaaagatgtatggcagtcattacatcccagctcaggtatctaacatctccaagcagatgcttccaaaagtcgaggcctatcatcagcgcaaactcagtgacaagttcttctgcgtttatttggacgctacctacattcctttgcgtcgcataacctttgatcgtgaagcagtttatattgccattggcatcaagcctaatggtcacaaggaagtcatcgataccgcattgctcccagcgaaaacgtcgagaattggacggaaatgcttcaagacatgaagtctcacggtctagaacaggttgggctctttctttcagatggcgttgtgggcatgaagacagtgctggagcagacttatccgaaagctcattttcaacgctgtctagttcatgtcatgcgcaatatttgcgctaaagtacgcgtagatgatcgcgaaacgatcatgaatgaattcaagcaaattcatcaacagccaaataaggaagccgcgatcaaagtcttgcacgccttctatgacaagtggaacagagcgtacaaccatgtcatcagaaatctcaaagagattgaacctgatctgctagtcttttacagctatcctaagcagatcagggcttcaatttactctaccaatatgatcgaatcctttaacaacgttatcaagcgtaaagctaagcctaaagcagagtttccaactgaacagtcgcttaatacttttattggcattcaggcaatgagctataatgaccgctacttcaaccgaattcacaaaggctttggtcaagtccaggataccttagaatcctactttgattaaataaaagattaaaaaatcaatctacgagaaaaatctatttacacaaaaaatttgacagtttcaaactatataaataataaataaaaattttaagctttttctctaaaaaacgtaaaatttaacattaatggtatgacataggtcaagaactcaatagctttctcctattcctgtttattttagatctaaaataaaaaaatggcaacttaaaagccatcagagatgtattctttgatggcttttaatagtcattaattaattaaatcattaatggcttgattattcttttgcttccaatcttttgtattgactttcgacttctgagaaagagtagaatctgaattaccttcactagatgaaatagcacggttaggtgaactaattctatggtcttttgctacagtagcatctgaatctgctggtaatatagtggcgcttccttcaactgtatcggagttcaaatcttcttcattattgaaagccatatcaggggtaacaatctctcccgtattactattcacaagcaaatcatctgaagctatttcttccttttgaagattagcttctttatcttgctcttgttcagaatagtcaatattcgattgatttaatggctttatactactacgatttgaacttaaatatgcgtcaattgcatttttactacgaatgtcagttggaattattgtggtgtacgaagctttagattgtgaatgatgtccaaatctactcctctgctcatttttttgctcttcaatttcattctttcttttcttgtagtaaaagaagaaaccagtagcaatacaaataataattaataaactcattttaacctcctataaacacaaaaagacacttaattactaatcagtaactaaatgcctttatagatttaataaaaataaacaatattcaacgcattagcgtcaataaacatcaaaatggtctttaaactttagacctaaaacccagccttagaaactacctaaggaataaatcaaaatcagaaataaataatggtttacatcattattttatcattctttccttcatattactatttttcgatgtaatccatagttcttgcggcaagccaagcagaatacttatatccttggttcttaaatctaacataattataagtttctcgctgaaagttctttttaactttcctcagtagcacaacatgaattttacaaatatgatttaaactataatccactaatttaatttgcatttgtaattttttagcttcagtaatattttcttgctgcttagctcgcatttttcgtaaagatgtcatgaagtttttacggtaatgatgtttagtgtagtaattccacgatgtttcaattcttttattctttttaatcatagcatcccatatttggtttctcttcataatcgtatcagcacgagttattttgtactgctctacattagcttgaaaatatatttcatccccttgtagcaactcttgtggtaattctagccaaggctttgttagttttacccataaatgatcagcaattatgtgtttacctttagcatcaataaagtcgtttttattagctaatctattttttttatcttgtgaatctacaagatatacatcagttaacagaattacagggatcttttgatgctggcgattaattttatgagtaatatgatcaaaagttgcatgataaaactgtgctggctttccaaaatattctgccaatctaaatctttgtttgctcaaattaattatttactccagctttcgttgacaatgtagtgattattacacatattaggtattaattgaccattgcgataaatatattctactccatcggcttgattaatgactttccaagaatgattacaaaattcttgattatttgacaaaaaagcagcactacgttctatccgatcaatagtgagcttattattcttttctaaattctttaactcacgtagcaaatttttatctttcattttttaccctaatatcatgaataggaggacttaactatagtttacattgtaatttttcgctgttgtagcaatcttttaaggatgtactcataagaaatacgattatagtagtaggtttgtgtatctatgcaaaaataagccggatttatttctgcctttccaaaagctatcttaaatacgctactaataaatcccgtttctctacacatctcatcaatactaataatttctgatttatcttcaagttgctgtaatttcgtcttagtaattcgtttaactggagcaaatgtcttttcattattgatagttagagccgtatccattttcttcctaattacctgaaggagtttttcagcatcccttttagttacaaatctaaagctaccagggtgttcagaaaactgcttagatttaatctgcttttgcttaaccatccttctaagcatttcagctttcactttatatccctgctctttaagtttatctataatctgaaagtatgcataatacccctctttatttattgcatttaaaatatctttgttaattctatctttgactgatttccgaattgttttatacgctttttcagaaaagtagcctttattatctgtaactcctttataagtggcgttaatacctaaatgcttcattaaatcatacaattcggttggatctaatccagtactttcagcaatttgatcaaaactataaattttatcaaatggatctagttcatatttactaaattttttagccatctttattctccttaatttaacaataatcatagaagtagcggaccacgcccataaaaaagttaaaattaaaaataaggcttaaattactacagtaattactacaattgtaattgttgcttttgttttctcgttattcttcattatttactattctccactgtgaactacttctaattactcatatttaccaatattattattagcaatagattggttaagttagtacctgtgaacactgcattcagtacttgtaaacccgctacaatattttggacaggatccaagccgaggatttgagtaatcggaatgcctaatgcccatgaaactatatatgtagtcactactaataagacaactacaatatcatctcttataagagatgaagaagtagtatgcgtaggaacatgcttatactcctgataaataaggtagattgccttaattaaaaccagaatagtaagttactcagtacatagcgtgtcactgtagaaaaagctaataagacgtttgcttccatttcttcaatcattcaaattattcccttcgctttaccaccaaactgtattcatactagtattagcatttactacaggcagattgtcatcaatattgaactcctctggatgctcctttaggaaacttacagcctcttttctaggaaatggtgttggatcttcaaaaaacttaaattttttaagaacatctgccgaccaattcttgataacatttttaatcttaggatcatcttgggttctaattaaatcaatggttgctgcaactgacgtgtaatgcattcttatagattttccgatttctctagtcattaagcgcatatgtcgatataagccatcatcatcacaatcaagcttgtatccctgccccaatgaataaatagcactgtaataatcatagctctgcatatacaagctagaaattttgtgactataggcttctccttggccaaatggatgaaaaacatgttcttggtctaagaagcccatttcagcattctcccattccatcttatgattagaattttgacgataaactagtaagctttgtttatctgtatatataagcatttggtagtagatagtaatgccaccaataggaagttggtgataagacaatttatagtccttacagttaaagccaaaattgcttgaaattgtgtaatattgttgtttagttgccataatgctcccctttcaaatcaaatttagactaatacttttaaagggaattttttcttttgtaaatatcaatagaattaatttgttttccacacaaaaaaagcattcacagtacatcaaaattcagtaccgcaaatgtttttttcactaaaagacttacaattcagtccgaatattacagattaagtctccgttccataatttaccattatggaagaactctactctacctgtaactggatcaacagttctattcaatttaaccatttttcctttcaaattatttgaatcataggtctttattcctataattttagcctgctcaggattatgaacaagcataaacttgttttgagcgtccttagtaacttctaaaccaatatcacgagaaatccttcctttttcatctaaaggatcctcacttagccacttgtacccagcaagaaattcatcaatgctaatgtttccaatttcatgccagttttcaaacaatttgctcttaccactatctactaatttcttcgcatgttcatatttcatatggctttcctctattttcttaaattcgtagatttttctaatacattaaaaatcttcaggtctgcaatatctttccccataaagttctggagtaacataagtaccaatttccgctggttgatcacgatatttctgctcgtctttatctaactcagctttttgccaaatttgatttaccttcttttcaatggtagaaatatccaatgacaagaagctattaaattggtgacaataagagttaacatctgttccataataaactatcccatcctttttggcttgttcattaaactctaattttccaaaccagtcatagtacatatcacctaaaatctgagacataaattcagcttttactggtgaaaactttcttctagcatcagtagaaacagcatgaatcttttgctctacatcatgagcagtaccttgcaccaggtttcgttcttccttagtaaaggctgaatcaactaataacaacatcaataacctccaaaagaaaaaggcttaagcacatacttaaacctttttactattattaaaataaacaataaacaccactaaaagtgtcataaacataaacgaagtccaactgtggactttaaaacaaagattaactacaacagctaatccacgaatcaaaataaataattattttattgattcacctttatgttaacatcatcctagaaaatctccttaaaatgcaaagaaagctaaaattagctaataattcctaactaataaatatttaaccttacgttttgaaatatttacaggctcaaattggtaggcaatagaaagatcatcaacatttaaatgtgtattcaagaagagattcttggtagttggggtattatgtattagcagaatatatttagtattgcattgtcctagtattcctcttaacctttcctcatcagtagaattaaaagtttgttgattatagcatgtagcatttgtagcagcagggggcattaaaaacataaaatcatccgtagaaaatttaggcactcgataactaaggaactggacataatctgatagagaaaaattagtgtcactaaactcagtagcgaattcttgagagccaataaaattcaattgctctttcaaatctacttgattatagtttttgccaccatacggacaagtataatttccttgattattgtaacgatacttaaatggatagctggtcatttgtaagtagtagaatagagccgaaaattcaaaagttcctaccctttgggcaaatgcatggttataaagctgttttaattctccataaattgctttttttattgcagtagtaatcaataatttgacttgctgctcacttagccttgacttatttttttgtactttacctaaaaaatccaatatgttataaccaacatctcgtgctacattatctggggcaactttaagagcatcaatattcgatgcagcattatatacaatcttttcagatatttcatctagtgattgactcaaattatgtatattactatcttccttattaatgtacttagataataaaattacatcttcattcatttcaggctgaatttttgattgctgtagcaatactgatatttctttcacaaattttaagaaggtttcatcttgtttagcaatcatagtccaaacattataaagctgcggtgactgacaatttaaatacgccttacctcggatataacctttgtccttaatttgttttaaaagaacatccgaaccaaaaaaaggatcataatattttttaatttctttaggtattagatttaaaacgaatttgagtgaagtagtatcaagactagggtatgaaaataaatacattttaaacatcttctttactactttaatcatatacgcttaatttatttagagactgtaaaatagtttgtgtaaggatgaatgattccttaaatttatttctttaaacattagaaaaaggagttcctttctcgtatgattggtttgaacaaaaaaaacatacagaaagaagaactccttcatgaatgattttacccaaaatatggcacaagctctattcaatcaagacaaaataaatgatttattgcgcaaagagctacaacaggctgttaataacttgctagaagctgaattgactgcctttctgggctatgatccctatgccagaaatggctggaatactggcaattctagaaatggtgcttatttccgcaaggttgatacccagtttggaccaattgaagtgcaagtgcctcgagatcgcaacggtcagtttcatcagcacacgctgcctgactacaagcagcactctgatgttttggaaagcacgattatcaagctatactccaaaggcgtaactaccagagaaatcgctgacttgattgagaaaatgtatggcagtcattatagtccagcccaagtatcaaatatttccaagcagatgctccccaaggttgaggcttatcacaagcgcaagctaagcgacaagtttttctgtgtctatttggatgcgacataccttcctttgcgccgagaaacgtttgagcgtgaagcagtctatattgccattggcattaaacctaatggacataaagaagtcattgactactgcattgcgcctagtgagaacattgaagtctggacagagatgcttcaaaacatgaagtccagaggcttgaagcaagttgagctctttctttctgatggtgttgttggcatgaaagcggccttgaccaggacttatcctaaagctcattttcaacgctgcttggttcatgtcatgcgcaatatctgtgctaaagtccgggtggatgaccgcgaaaagatcatgaacgaattcaagcagatacatcaacagacaagccaaaaagaagctgcagctgtcttgcatgaattttatgcaaaatggaataaagcttatagccatgttatcaaaggtttgagggaaattgagcccgatctgctggtcttctacaattatcccaaacaaatcagagcttcaatttattcaaccaacatgattgaatcctttaacaacgtcatcaagcgtaaagctaagcctaaggcagaatttccaactgaacagtcgcttgatgtatttattggcatccaggcaatgagctacaatgaccgttatttcaatcgaattcataaaggctttggtcaggttcaggacaccttagaatcctactttgattaaataaataattaaaaaatcaatttacgagaaagatctatttacacaaaagatttgacagtttctttatttacgtctgcaatgttaatttaaccctatttttacttaaacaaagtgcgaaaaaatcatatattcggtttaatttttatacttcatgtctcataataactatgaagatagtgataagaagatgtttttaaaagatgtatctttgcatcgaaagaattggagatattcatggaagcagaaattaagtatttaaatgttacagagaagcatttcttaaaccatttaaatttcctacaatcaatgaatcaaattgagacgaataaacctgcgtctttgtactttacgactgaaagcgaagatgacggaaaatttcatagttacattatcttagcagtttacaataatttaattcaggctagtacgtgtttaaagacaccatttttagtctcatctacttatactagagatattgataaagaagcatggctagcttatcataaatggattagtgaaaataccagtttctttcaaaatctattaaatggtcttgaagacgctggatttaacgaactaaaagtattagaaccagcttatcattcaatgatgaatatcatttatgacttaaagttaaaaactaagcaacaaaaagatttgcaaaaagatcaaattcaactgatctacagatactaacattgtcattaatctatgacctgtatctaggaaaaatcaaaaatttaaaaattctactaacccttggttaggcaacatactgcatattatataagttatatgatattatatactcagaaatgattacacgtaatttataaatgagtacgaggtgctaaaatgagtacagcaatgagtaaaagcaaacaaagggtgcaagctaatattgatccacagctaaaatcagatgcagaatatattattgatgaggtaggattaactcctactgcagttattaatgggctatacagagagatagtcgcaacaggaaagattccactatctttctctttaaccccagagcaaagagcagatatggccgtaaggcaagcatcagaaaaagtacctgttagaaagctaagaagcaaaaaagaaattgaggatttctttaatgaggactaatgatatatatactacttatgtttcttggggtaaaagcggaaaaaggcgtccagttttaatcattagctctacttcaacagattttacattttataaaattactagtcagtatgctaaaaaatcaaagcgaattaaaagaaattattatccaattaagcagtggcaagccgcaggtctgaaggaacagtcttatgttgatattggagaaaaagtaaatttgcttaaggacactgtaagaacggattatgttggtaggtttactatagaagataaattcggtttagctaactttattaaaaacagatataaataagaaatcctattaaatcaaggtttagcaatttttgatctgtaccaagatttaacaggacttttattttgagtaaaattaaaaaattagttaaagcatggatgtcatttacttaatgactcatttttcttattcacactatgctgaatctcttgttcatcttttttagtatggccaaaataatcctgttgattaggatgagcttttaaaaaagcttttctatccaatgaatactgatcatccaatggaatattgcctatttcacgaattctaaaataaggatttgtaggattcagatatctgcgaattggaaagttccactgatttaattcattggtaatttcagtctgctcccaatcattttttaatttactatattcagccgccctagtttcactatctgttttctgggcttcttctgctaaacgttgcagtttttcattgtcatgcagtatagctatgtcttcatctaatggtgtcccatttgtatcatttctaattttaaaagcaaaagcaaaggtatcaaaataaagcaagccgaaaccattgataaaagctcgtcctactgcgaggaataccccagcaacatcagctaaaaacttgccctgcggtattggaaacctaattgataaataatgcaaaagaatctgcaaaggtattgcacgatctaactctggtggtcttttagttagcctatctggagataaatcaaagaagaaatatctaaatggtacaaagccaagtattgctattgctggtaatggcttagaagtaatcgcaaaatatagaattcctcctagtgttgctatccagcaaagaatcaaagctgagatattaaaaaggcgtgaaccggagaaagattcactatccttttcattaagatgtatcttattatccaccagttcacacctcttttactatttaccaaattgttctaaagaaagcatcaagattagtaccagacaagtaaccaggatgatttgctttaaagttacgtacatcccgctctgtatatggcattactcgattttgtaagaagccatcagcatcatcaactctatgagaatcattataaaagtcagacataatcttagatgataattccttttcattttgcttcatatttccattgaagaataattgataatccttaccagtatcaacgttaaagccattcaaatcatcactcttaagagggatagaaaaattagtttgttcaggtaatgactttaagaatggattagatttagtttcgttggataatgcttctctgacacctgtgtatggatttacaccagtaactaccatagtatctttgttaccttgtaaggcaaaacctgagtaacctagatatttatctacagtagctacaccatcagcttgatttgctctagttaaaacattagattgtggcaaatgagcgaaatcaccaggagtagtttgaacttgtgaacctaagttaccttcaccaaagaaattacttaaattaggaataccattagttaatgtagctcccactcgttgatcattttgaattcgatatggctcactaattgaatgtgtgcttacattataagctagactaggtctgcctgatgctgacatatccatatcttgatatacagtatcaccataacctaacgtaccatcgccaggcccaaatttacctacattaaaccaattaccattttcatcttgggcttgtaccgttgattgcgtattttgtattgccatgcgaaatacaccaggctgaacaccaattggtttttcacgactatctaatactttaggcatcattgcatatgcagccttcagtgataatccatgagcttgaggttgcaaatatggattatttgtaattctatccatacttccatcatcattaaagcctactgcattagtaccataagtagctgaactagttttatttgagttaccacctaagcctacatttccaaaccatgaacctaaattgagcggatcaaaggcttttgaagctttagtagtcatatcctcaaattctgcccattgatgttttgattgatcatagtaagatgctttatctgcattatttacatagtcgtcaatatcttgtgcattaggatttgcttgtgcatccccaattaatccaccataagcattcatattttcgccattgtagacagaatcaaggtcttgcgcagttactttaggcattccaccccaacctgaattaatagtattagctctttgctgattaagctgattccaaagtccagaatcaataatttgtgcagttgctccgtcaccaactaagctcttagcagtctcagttaaggactgcccttcaattggatcagcaactgaaccaagactagttgctttcttggtaggaataccagcttcttttaagcccttaacagcttctgatttaaaaatatcactattaataattccatcaggattttctttaattccttgttggaaactagaatcattaactgaatttagaatccgaccattagaattatttaaagcggcttgtgcggcatttttagctttagcatcaattcctggcttatagcccttctgatattgatcagtcttctgccaatctgcaaaactcatttgagtaggatcagtattaggaattactccattgttatacttagattctaaactgtttaattctttttgcttagtggcctgactaatatgctgagcatctaagaaacccatcttatccatcaggatatgtgaatcattagctggtgcccctgcgaggatcatcgcttgatctccaatttgttcagcggcttctttttgttgcggagttaaggaactatcattattaatagcttcacgataagctttattaatatcagctaatgatttgtaattgtttttgccgttacgaagacgtttagcccttgcctgaatagcttgatcagcatcaagcccaccatgcttttcaaattgtctagcagcatcggcgtcagcaactgcttgctttaattcagcattattataataatctggagccgccttagctttttgaataaaggtatcataaccaggagatttatctaatgctcgttttaatgcatcactcgttgcttggtcggtaattccatttaatctacggcgaagttcatctttaaaatctcgattagggtcagcttctttaagagctaatttagacaatggccctgaagtcaatctagcagctcttgatccaatttcgccacctagtcttgacattgcaattgctgtagctggatctccagcacctaatcctgcggacatgccagctacctcgccaacacttcggccggccatacctctaactttggcatcaacaccggccaatttatctctcatttcattaatcggagttttttgattccaagattttccgaaagctttcttaaatgctccggtcttagcaccagctttagccgctttagctgctttgccggcggacatcaatgctttacttcccgctaaagctgatacaccaccagttgccgtgctaagagccaaacctgcagctccgatagctacgccacctgcaacagcggccccagcttttaacgaatgagaagtacttctatggatttcatctaacatatgtgtctgcaaaccaaacaaatctgccagtgctttagacaatggttgaaacattaccataataataaatccaataaccattgtttcaaagtgcttataggcgttacttacatctactcctgggccaactatacctacaaactgacctatgcctttaattgcgtcacctgcggctccaaggggatgcccactagtagttaaatcaaaactatggtgtaatgtttgaccaccagcttctaatttgcttttggacttaatatccgcaacttccattgaccaattatcagagttccatgccataaggacagccataaatgttatggttattgcatggattgactgcatcataactgttccgataatttcacgaagccagttaaccgtacggattttgccccaatcacttggccagaaggcaataaacactggccctaaagcccaaagaatcgtaaatacaacctcacgaacaaagtagtaatatttaatgtaaactgctaagccaatatatgtcattaagtaaatgacgctgaagataatacctacgaaatcactacctaagaatgtaccactggtcagcatattaatagtggttttactaaatcctagtgttactgcttctgataagattgtatttccacttgaggtagtagtttgtgccataaaacctgctaatccagtaacaatagccccattgactgaaagaattaccgagattaataagttatactctaaacatccaactacagcgataacagtatcaaccagactgcgataccattctcgtcttgattcgacaggattaaaagcttggccaactcccattttagtcgtctgaatgattaaaataatcataatcaaaacagctgatagagctaagaagactggtccaatcactacacctaccccttgaatactttgagtataagcagaattagggtagatctcagcatagccattagcattgtaagcattagcaatttcagagtacatttgtgggccagaagtaccagctgtgtaattaatgccaaaaatcgtagctccagctcctgatttagccatccactgaccaataccagaagagtagaacagatctagtaaagctttagctacttttccgctaaaagttgaaggctcagaattagctcctgaaacatttttgctttgttcgttatttcctttattgatattattagacgacttacctaaatctttatttatttgatcaagaatcttcttacgtttcttatcattctttaaatacttattatatgcatcccctgttaggttcatcacttctgcttccgccgcagcacgagttaattttttaccatgctttttacggttagcagcccatttactgaaattagttttgatatacttctgaatattagcgttttccttattagtcagacgactatctcggccaattgaatctagcgtagtattttcctgattagcattagttaaccaattaccatttaaaccaatttttacatgcttttgcttattccaagcatcaaaggctttgttataacgcttagcttgaatatagcctccaccagtagaggaaccagattgaatacgctcagtttcttgaccaatatttttaccaagtttacttatttttccttgtttccaagtctttttaattcctgcacctaatcctcttagtcctgacataaaagctggatccttaggattaagattagccttaatagcattggtaacttgctgagtggtcgtttcatcaccccaagtaggcatagttactttggcatatgctacaatagccgtattaattactactaaagtaacaatagcggctaaaactccaatccctatctttgcccaagaattccatggagaataagtatttgttttttcttttctatttgtttgagaactattcataccatgacctactctcacttattgcttaagcttttcattaatttcacgaactgcatctttagtttttcttgccagttccacagctcggttagattcagcaaattccatttcttcttgactaggattagttttaatccaaatactgtctccttctgctcttaagattccttctcctggctctggatttcccgttaaaatatttaaagcaccatctgttaaatcaatagcgtccttcattaactgacggtgttcaggtttagtttgtagacaaaacataaattcactgttggtaacaagggctttagcttgcggtctgccttggaatcgttcaatatcttgcgttagccagcagagggaaccattacgtttacgacaacgtctaaccatcatttcaaaaaagccaaacattactggatcatcaataaattgcaaaatttcgtcagcgtctagtacttttttagttgtagctttttctggattggtcatccaacgttcccacaagtatttagtaattacataataagccacacgcttaagtgaaccaacaagctgtgaaatattaaagttcacgtaaagatacttgttaaggtctgcagtacggccattcccaaaataagtttggccatcaaagattggcttgcttcctgtacgtaaataaggttttagcccgtcaagcagtcttgataccttagggtcttcactgccgtctggcaaagtattttgtttagctaactcttgataaatgtcagttaaagtcggttctggcttaggaattcggtcatagaagcgcccatttagagtaccagctttatcttcatatagtgaattaggatctgcggtaatacctaatcgcttaaccacagcattaatcgcatcttctaaccgactggtttcactgacgttcagacctttttcattgccattagctgataaaatttcattaacgaaaccttcaacattagaaatcattgaagagacatttactttttgaacgaacttctcaccgtcttcatgtgtaattacttggcgtccatcattgctaagcttaatttgatcttcaatttcttgctcggtcatttgccggccgttttcatcagtttcaatttcttcttcaagtggagtttcagttaatgaaacagcacatggattaatgataaatttagcatctgatgtaatcgttaaatttaactggtgcaagtgctttgctaataaaacatattcaccatcaggatcaatactacgatgctcaaaaccaagaatggcaatttctcgttccattttgattttgtttgtcgtacttttacctgaacctgattctcctacaattcccatattgtagttaattggtctatgggtcttggaaccaaagacattcaaaaattcagtattagcagaaggcgttgcttgatttgtcccaataggtattccaccgttaaatctacctgcagcattacgagccatatccataactgataaacttttacgatcgacatttctaaacgtatcatcaaggttatacattctggctccaattggaatagtttgtaaatacccacttttaactcttttaacataaggggttaaagaaataccttcattagctagtaagtcttctgcaacgccaaagttcttattcatttcacgttccgaattaccataaacaatgatactgatatttacgttatacagcctattttcatcgaactgcacttcatctaacaggttatcaatatcactgtatttcgtaatattctcacgcatctggaatgtttgccctttatcttgttgatactcagaattggagcgaattacgttcaaatctttagacaattctttcataatatttctgcgctcacgtgggacaacatccatagtcaaatcaatattcccttgtgccaaaagttcttgaaaaatacccgtatctaccatacgtggataccctgacggcggaacataagcagctattccatatgtcctgtgcttcatagtctcacgcataataaaatattcctgcataacatcatctgttgaccaatatgaattggcaataatattaattaagctaggttggccaatagctgtgctaggggaacgttgattatcatagaattcatcttccggatcttcttgttcatcttgattgccaaaagcttcgtttgaatcatcatcttgatcttcttcagtttcttgatcctgaccttcaactgattcatcatcttgatcattttttgaaaataaatttttaaaaaagcccatacgcttatccttcctatttcagattatctagccctgtaatatcaataccatcatctggggatgcattctcattctcgcctgaagcaccattagcttctggggaagcattctcttggtcattattagtagtgttagtctctgaaagaatatcttctggaaccttaaaaggtgaatctggttcttcttgaaattcatcattatcttcgattgaatcatcatcttctacggtagcttgtgtgcctttggaatctgcagaataataatcctgccccttagacaatttcttttcattctctgcctgttgctgcaaccacatagcgtccctagcatgattcattaattcagcttcaatcttgattttttgttgtacttctttaaaaagcttgtctgattgatgtgctgaagtataaagtgagaatctttgtttacgaataatatcctcaaatctcatttttacggaagattcacgattaaatgtcttatataaaacttcaagcaagccaaaagtatctaatggatttaatgcatgatccgctctgcgcaaaatgccattagcgttagcgatttgtcgtagtaatttttcaagtgctttttcatgtatttgcttttctagcacttcaggggtatctccataaacctcatctggctgaataattgccataaattgcaggtaacaacgattttcaaaacggtcagtttgatgttgataatttaaggtattatcaattacatcacgagcaattttcttcatttccttattggaattttgcaaatattgagaatgatcttttaagctatttaaaaaatcagtcatttcaatcttttgactttgcgaagatattttcagtgggcgatgtacaccattgtaaaatacttcttgtagtgcattatcttgctgtatttcttgatctgtttttaatgaaggattagactgttgcatttcagctagcatgatgaacattcttgaattatcaccggtctcgtactcaatcatggcgtttcgaatatctaaaacgccaacttcagccaggaaatcttcccatgtctgccagtcctcaaagccaaagtctccttcataaactggagcagaaccaggatcgtcttcctcgctctctgagacatctattgcatcacctgaattatctctaggcgttaagtcaaaattttgttgctgtgaatgtcgatgccaaataattactgcaacgattattgctgtaattgcgagaataaaagatataactactaaaatttttaagcacccctttaaaaaagtaatgttaaagctaacggccaacccctttaattcgaagaagttggccgctgaatttagcattatttatctacgcttataacgaacattacgtctacgacggctattcactttacttgtattgctaccagcactaaataaagctctaaaaaagccaacctgtcttactcgttgagtaaattcgcctggctttaatgtcgtcttatatccaattaacccagcagtccaaatagcaactgaaattaagatagttgtcaaaatttgcgtattattagctacggcatcgactgtaaggacaagccaaacaacaaaagtaccaattaaaattaatctaggtctattaatattagtcttttgatttaatctttttggtttacgatctctcatcaatcgtcttcctcctctctatctaaaactgcatatggtaaagctcggtttactggatgatgaggtggttgcaaatttaaatatgtaccgatttcatgagttaaaaatcgtctatttatcataatttgcttgttttcgtagtagagaaggtctccttgtttatcacgtattggcttaaatgctatataaataaatgggcctaatactgcaagaaagaaaaatccagcaatggtagctgacgaaccaataccagctcctgataacttacaaatccattgaataagcttaaaaactaaagctcctataataattccagcaccagtgatgctgatctgagtccaagaagcatatcctaagacttttttctgatcacccgaaaggttgactattaaaactcgtctaccttcacccataaaaactccttcccacatccaactagcattggacatattactaagagcgtttatttacgcttatctacctgccttgttgctaagaccgacaaccataccaacaagtgaacgaacgtgaataatgactacagcaccaacgataatgaagaagatacctacgatagcttcagttctgcttctaggatctcccatagcactaacaccgatcttaatcccacaaactacagcggaaatgattaagaggacggcacccaagttttgcaaaggtgcaacaaattcgttcataatcttagccaacacgtcaacagcattaccatgcgtatcaacgtgagttgagaatgctgatgagttatcactttcttcagcaaaaactggagttgaagttaaagccatagcttgagttgatgcaaaagcagccaacatactcagcaagaatcggatacgagttgcagaacttgcaaaaaaatccgtgattttggcaatcatatcttttactcccttccaacaaattcaagcaaaaatacaaaatgagccactaatgctagtcatacattagcggctcattataagcctgttaatcatcaaagaaatttaggagcttaattccatatttttgcttcacaaataatataaatgaaactctaaaaattatgttgtacttcaaataccactgataaaattaaaaaccatagtatttattgcgcaatatttttagcaaaagccatttcttcggtcttaattccgtttgctacttccttatctgtcaaaacttgcatccctacgttaccattaggatttttgataaaagaaccatcacgtgatactaataaatacacttttagattagaagtatccgtaaagtattttttagcaagccttaaaacacgttgttcaagttggggttctgctcttttaattaaggtcatttcaaaagcctcttttcttaaatatgtggtcgatttttattttaggcgtaattttaattaggtaaatcaattgaaaatttatgtaaaaaaactaagaaaaaagtgtagcaaaaaagacttaattcgtttaaaatcaagtctttaatttttatttttctattggtgaaatgtccataattttacgaatgtttatcagatgtcgctgcttagagtacttttgatttttatatgctgaaatgaactgtttattgttactaagcaaataagcctgagcctgatcataatttttaaattgatctgtatataatatctctccgtccgaggtcttaatcaataaaatgcatttctctgtaagctgaccttgaatttctgaccttagcttatgtttagcttttatctgaatatttttaggtttattgagatgcttctcaatatttaaggaattacacttaaaacgtcctttcacaatttcaataccctgtttatcaagcaagtactctccatcattacttaattgatagtgacctatgattggagtactttgatgagttgcaatgttaagataattacttatttcttctggagtaactccaactagtaatctcgctaccaatctaacaggcatatattcttgaatcctctgatttggcacgctttttgtttttgattctacctttatattcttaagtgaaagttgctcagctcgttgtcgtttagttgttttattccttttaagtgcctgtgaaatcgttttgattgcaaaactgtctaagaaaataaaactgcgcttgtaataataatgctggtcaataagattacgatgatttcgcatccaagtaactatttgatttctaataacagaaaaatcttttgtatttgccaacttgttggcaagtaccgcatgagaagtccacatcaattttttcatttctaattcagtcaatacttgatccatattaggcaatgggttattttctttattaatgtaaccaatagataccttaggtaagtagtgtttgataatttttataaagccaccacgagtagttgcccaaggatgcctagctatattaagattacgtgaatacccaatatgtaatgattttaaacttgcaaagatatcagcttctaattgtgctaaatcttcttgatttgggtctcccgtagcataataaataagttgagcaatatcatcaagtttaaatgccttataaccccacgagcaaattgcaccatatgcagtaattgctcctaggtcatggtaggtataatgttctgaaggatatcctaaaatcttgctccattgcttaatcatagatggctttgctttgatttctacatctaattgattcagcctttcttgtactggctgaattgcgcttatgctatcataatattttggttttgctatgttccattggcatttttttattacattttctaatttttcaataatttcagcattatataaaggtctggtaaagtagttcttgccagtcttaatttttaattgttttactggccttgctttcaaaaaagtatcaagtatagtcataatattgccagtagtaagtcgatggtaatatctactgtcaattaaatcttgatttacttgttgcgttatttgacctaacgaaagagtcgcaattatcttacttttagctggaactactgatgctttgctccttttagcttttgttttacgggatggattatatttattttcattactttttttagcaaatgcattagataatgtcggtgcaggtttaacttttcttttttggggttttggctgaatatttttgcccgattgatgttgatttaaccatgtttttcttacgtaatttctacctaaaataacgattttagaaacttcaccatgatactctactatagcttgctgaacatctttggtatcagcagaaatatatatcgtcttgactagtctgcttaaactttcacgcagatcaaataaactaatttgaaaccccgtttttcttattcccgttaaatctacattctgtcttaagtattctgaaagcatgttcctatctgtatgaaggtagactgataattcttttaaagaataaccagtagtaggggctttatgcattaagtcaataacctgtctaaatttctcttgcctttttagctcatcataatcataaattggattattattttccattccactattcttaaaacctatgtagcgcattacttctgataattttgttgggtctaccttttgatcataggcaatcatattagccgtcattaagctatttgtcgagtcccacactagttctagtttagaaataccagcaagcttacgccattcatcaaactgaatcatttcaggtgagtgattcaaattaatgtaatcaacataaccatatcgtaatgaagcttttaagggcaaatttaatgtaattccagtattcttaactaatttagggttaactataccaaacaatttacaaatcttatttgaagaaacaatttgtagtttagctgagaatgaaataatagcattcttatgaattatcttgcctatttgttgtaatggtaaatggacatcagtgctatctgtataaattggttcataattagtttcattttttaaatcagttaccactacgtaagaacgaataatgccatgcgcacaggtattaactagttttttagctctagcttcaacaattatggacttaatttctacacttggtctcaactctttctttggaatgtccttgtctttatatggcataatttcatttaaatatctatctccaacgtgttcataaatgcttggttttacagtcatagtaaagctgctagcatccgtattaagtactgactccttcttttcaagtgcagaacgttttaaacatagtacccaatcacctttacgatcatagtcactctgtagttgtttttctgaatttttaccactaactcctaataaaccactattaactatttctgtatcacctaaagtgtaacaattattttgtttatcgaattttatttcactacgtcctaccaagacttcacctatactggcatataattttgcaaaagaaaataaactaatattctgacatcttagccaaacgtgactagcaaataacttaaattcattctgattatatagtgtacacaaatttcctattaaaatatatgattcttgcgaactgacaattttagaatcaagtactattcccatccaactaatacaattatctttatctttttctgtatttagtaaaagattatgaggtttagcttccagcaaattatccttaatctgatagaaattttttctacgtaagttattaagtatttctgctcgctttcgaggattattcatgtctttttctggtacttctacttcggtatttttattttcactttttttctcaatttgatgttgtaattgcatcaatttctttaaattctttttagctattctcatactttaatcacccttcttacagccaatagccacataaacgacctaaatcgtgccaaaagctgttagtataacgttttcggagtggctcgtgtactggaatatatctatgcaatacttcagagtatttttcattattcttatcttgggcttccacccttaccaaaattccaattcctaaatcagtatcgtcacctatcaatagcttttccttgttttcattacctaatttcaagaagcgttcccaaaaataattggcgtgaatttacacgtaaaattatagtgccaatacaggtaaatactagtcttaatcaccctatttggcgtaaagatatattaagccaaaattattttaatttactcaagcaagcccatgtagacactaataagtattatgatgtttttaccaagtttatgggagctacaaatgagtttgatttttatcaaaaacatcccgatacaattagcacgattaataagattaatcctaaaaataatgatctaaacgatttaggaaatcaaacattaattatgcctaactactttattccccctttgcatttcaattatagtttcgacatttatgatacattttatggcaatttcgacatgctaacaaaatcatataaagacacagctaaacaactcggtactgtagctgttccagaaatcaataatttatttaaacaaattattgacataaatatagataatcaaatcaacgatacattaaatttactagctgctagtctcggtactaatttttatccaacattatgtgatacattgaaattttatcctgagcttttacctacacttagtcacaatcatcaaggaagcaattgtattaatatgttcaatctcatttatggtaaaaaaagttcttttcctcgtcacgacttgttgctcctgggatgcaagaactggcggagcatctatgactttgaagaagtaactcctgaatttcaggttccctgttacaaaaattaattagtttaaaccagtaaacgcaaaaagattttggagaaactatgaaataagtgtctgagaaaaatcagaaattaataaatcctactaaatcttggtattaaactttgatttaataggatttttcttttaattgaaagtctaaaattaactaaaaaagacttttttacagacacttactttaagtatgatttaaaaaagttattcttgactcaaatattttttattaacattccaaatttcaagttgttgcttcttaagatttaattctttaattttcattgccaaatcatataattgttcagcaacattagtacattcattggcatacaaatactttgattttactgtttgatctagttcgtctgataatcttgctatttcttgcctaatacttttttctgataattccaagttttcttcatctagacctattatttttttcaaagtatcttctttattcatttggttttagcctcattttcttatcctttttcatccaagttaaatatcacaatatcccttaaagggctccaattgcacatacaattaaaatcacccaaaagataaacaatgttgtatgccaatctttaggaaatggaatcatataactcggattgccgtttccataaataatacctaaccaccataaaggatccctataatgtctcataaatatcacccttaacctttcattttcattctagcaaaataaagcatgataaaacgaaagttataaggttttaattgactaagttttctcttaattcaaaattgtgccaagcattagccacattactaaagctatactttctaaccaccgaatatgcattcttagaataatcagctaaaatagcgggatgacttaataaagcatccaaagtttgaaccaattgcacttcattaccagcttgtactaacttaccagtataattatccgttattatttctttaggcccataattaacattataagcaactgctgggcaaccatgctcttgtgcctctaataaagccatagcaaatccttcatatttactagtaagaatttctaaccatgcattgttataaacattatccaaattatttaaaaagccagcaaaatgaatataattctgtgcatgattttgaataactaaattgtgtaacgaaggaccagttactttatcagtggtactttgctcatatccataaaaggtcaaattgagttgaggatatttaggcttaagcttgatcacagctcgaataatgtgatctaatcgtttttcttcacttaatctagcaacagcgattaaattgtaaggcgttctatttgcaaatgagactggtttaatattgtcactagcataagtaactggaattgcataactatgattagtcttaaaaatattagcaacatcatctgcttcttgattagttgatgaaattaaaccattcaaacttccttgatttaacatgtcagaaatactttcatacataccaaaaagtcgtccattgcgttgaccatcaactgtaaccgaagagtgaaaaattaaatagcgtggtacaatttgcctcatttgctgaaattcatacagagtgcgctctgatctatctgcaaaaaatacagcctttaaatcattttgagctaattcatcaaaaaaataagctctgaaagccgtgattgaatcaaaattatgccaaacatctcgataatataattgaattagggtaagaattggactattaccttcaccgccacgataatgcattaatataattggcttgctattatcgttataatattgtgtcaaaaccaatctccctttatcttcatagaaatcagtaaatgaaaggcaaccctgatcataataatccgttcgatctaaaaagccgtaacgatcataataatcaattgaatataagcgattatataaaaagccaatttttagccttaacttattgtccttataagctgcattgtttcgtaactcatagcctgacatctgagttatttgattaataattacacgatcaattacaggatcatcttgataattcaaattttgaaagtattgataaagattaattactttgccttccgtgcctaaatttctttgggcataagcatgagcattgttgtactcagtttctacgattttagcgttttgaccattcgcattaaataatttaattcgtttagcttgtgcaatttcaattgcggacggcattgggtcctccatactagtaataaaataattcgccatactttcccctccgtttaccttgctaaaaatatagtagaggcaaacataaaactatagcaaaatgcaaatataaaagttttttaactagtttttgtcaggattgcattattcataattatcaaagcatcccaaaacaaaaaagcattatctagtctcaaaattaatgactagataatgcatagttaagaatcaatttaagatatttatttaatcaatatttttctttttataaaatgattttactcgcttagttttcagcttattaacattcatactttttgattctagtgaattattcaaatgatactgaacttctttaagactgggtaaagtacttatcatacgatctaatgctatatcttcctgttcctttgtagtagctcgatagaaacgcattaaactgagcatgaactctgcatgttcgatattatcaaaaggtaaggttagataatcctttgaattccaagtattaagagctgcattttcagcaattaaagctgtccttttatttccgtcttgaaatggttgtaatttagatagttctgcaaatactctccaagcatccttagcagattgcttagatctcttaaattcatctactatgctatctaaatcttccggataaacattttcaggggcgtaatatgctcctttaactgtgccattgggatctgttactattaaaactgcatcatcaggatcaaagctagcttttcttaaatgacctggaatattagggtcttcatttttgctatgaacaaaagtcttattaatttcaataatacttttcgttgaaaagcccatttcttgagcaactgctattccatctaacgcatccttcaatattccaccgtcatgatgctgatgttcaagcttagataagtcatgaaaatccaaagcaagcttagtttgtaaaatagtactactataactattcatgctgccaaaagatactataaaatttgctaagcctaaattatcgttcatcttatctctaccttctcccctttttgattaactacaattctaacatcttttaatctaaatcaattacaaaaagctaagcactaatttcgcctaccttaactttttctagttgcttctttagatcaggaaaaagcttatcaaagtagataactacttgggacatagccgctttccgaataacattgtattcagtatgctcataatacttacgcattgttgtaagtgaaggctctgatactgcattaaataaatataattctaagcttctagcaaatacttctgttggaattaataatttgctttgctcattttttatattcgatttaacaacataagaacttacagcttgcaggatgggactaaaatcagacgacatgcttaatgtagtatttgaagtagataagtactgataatctaagaaatgaccatattcatgtacaaaagtattggctccttcttcgtatttaccatttgatatttgctttctccgtggatctaatactatttggttagtcgaaacaagatatactcctaatttcttaggcaatttcttaaatttcaatactggttgcttattagtctggggtaataaatgaatccaagtatcaattttcttttctgcttgatgaaaacattccaattcaaaattatcatcaatgcatagctctgaaaaatctttctgcaacggactactatacatagcgttaattagtggcacttgtagatttgtgtgcttatgccagcgcttactacgtgttagtaccacaagattattttcatgtttttgcattaaaatctcagaataatttctacttaaatacattttgataaagtccttagtctttattccatcattaaatccactaaagggatgccctgtacttttagcatatgattcagctaaagcaaaagcactatcattaatccaacttgtatcttcaacaaaatgttctaacgacatgtaacttgttgtacgcttaccactaagcaaaccttcaatcgttctaaaaaacgtttgttgctcgatgccatggttattcttctgatattctgcaattaagttcttcactaatttgctaaatccaagtagcatcccttttgaaatataagtgaaatcgtagtgcttacctttataagaataaatagttccactagtttccagcttcaaatgatcattagtcaaaaccaagtagtgacttctaccattataagtatgtaaaataatcttaattgcataattataggtagaataacgccctgctagtaaacctaatttatgaatttcttccttgtcaacgtttttactatctttagcccactccttttctaaaggattaggacatttgctacctttttcaaaacctaaaaatgggaacaggtatgtagcagcgtttaagtaatcactccacgtccattcacaattttggtaaatgaaataagcagttttacgaaaagaatcccataatttatctgtaggtgaagcgtctagtattttcaaatttttcagtttgtttataccaaactttttatgaactaacgagttatccattagtccatgatctggtacaatcctatcaaaactaaacaattctaattgttgatcttgcatttttccttctcctttttcttacataaacaaaaaaacactgtctgaactacaaacagtgtctttagatatttttaaatttcttactaaatgagctgggcgcttatttcactactaatttgattgaaataattcatttcgctagttagaattgcggaatatttttctttatcaaaaatagttggcttttgctcccttattttatttagctcgacttccatattaaagttgtcaatctgtgactttagtcccttcagcattgctttattagcatttccattcataatttgctttttaaataaagttaccgtgaaattgatcaagccattttttctggcaaatcttagctgaatgaaaagtattctattcaaaccatgctcatcaaaataagtcacatgagttggataaaatttgaccataccataatgctttaagcaagaattataataagtaactacttcttgctcctctaattgagatatagttgccatttcaagcttgttattcaatgcacccttcaaactctctctagcttctggatattgttcaaccaaagaaaatagctgagctaccttaattaaagaatcctcatcataatgcagtctttttagctgatcattagtatgaatattatattgctgaacaaaattctcattatgagcttcttgctcttgtaagaaccctacttgtgacacaatttccttagctaactttttcaatactactgattgaattgcaacagcatcagtgttaacaaaaaaggtcgctgaatcaagcattatctttaactgtaacttatatggtgcaattaaataaaaagctaatttaggtactcctttacttgttacatctttccaatcccatttacatgagacaggtacatatgcagtacaaatcttgtttatcgtattaagcatcgtaattaagatttggggattagaatgagtttctttctctgcccaaagtgaatcatgcacctcttctttttcagtatgaacaacataatcactcgtagtattatttgcatttgaagaaaaatgattcttttggaaattcttagtttcttcatcaattacttcacaagtacctatgaatgaatcctttaaatcttgcttggcttgatctaaaaaattaaataaatctgacatattttacctccattacttaatagaaaaaaacctagaattacactacatgaatgaaaatccagaatctttttaactaacaaaatacaaatttaactctatgactaacaaagtgtcacttaacaaaaaagatgccaataagctttacaacctaattgacacctcaacataaacaataaaaacaaaatttgacaattaacaataaaacaaatcctactttggatttattaaacaacttaactcacatgagttaatcaaaaaatcaaaaataaaaataatcaagtaattatttttacaatgatagtttaacatgattcagttcttatctgcattcaagaatattttgacgcaataaacaaaaaaagatcagaatttccgaaattaggagattctggtctttaattttgctttttaatattgttcttcatctaatgcagaatcaattacttgattgagattagtttctttatttatccctacctttttattaaccacttcaaagtcctttttacatggatttagatagtagcccactttagcaagataagtcttaaacaaaaattcagatgcattagcatccctacctttaagcaattgttcttggatttgtttatcttggtctaaatcagtgttcaatgtttcagcaaagctctcaatgtctttacctactagttgaggtaatttgcccaatttaggatcataagcataaatatcctgcttttgattccattcaagcccaggaatgatttttctttttctgaggattaacttatcagagttattctttatcactgctacggcatgtaacaatgtatccggataagtatcacacatagcttcttctgatgaaggcagcttggtcaaattcagcaatctatctgataactctttacctgcaacaatcaatttctcaggtaaattagaatgctttaaatcagctattgcttccatattgtaacgatcaagagggaaaattgtcagctctaaatccatcgtaaattcattattgatggctaaggcataccgtcctcctcttttttgactatttctaatcattttcttgatgttctgatcttcagcaaaatcttcgtcacttaagtctaccttatcaaaatcaatgtaatcagcactaaaatatttcattttaggcaatgctacttcactgatagcattagcttgctcgacctgtatatacattttgtcctgtgggcaaatgtccttagtcttaattttacctttcataattgaatcttttagcatatttacacctttcctttacttatcacttgcaagaactacagcttgttcaagcttatgttccgcatctttcataactacctgctcgtaaaatttattaatgatgcaatacaatttactgtttaagtatggatcagcaaattgagctggatctgctggattttgacctcttactaaacgagacatataatctgaaaacttagtatgcgtatcataatatccagctttaccgcaactgacttcatcatttaactcactaatatcattaatggttaaaccaatattctttagtttttgtttcttaagatcagagtacagcttattgacctttttcttaatgtaaggcttaactaattgggatgcatttttcgcatctaattcccaatcttgtagaactaaaccatttttatctgcattttcttgtgctttttggtcttggcaaagagcaactaaatagttgaatccaacatttcgaggatcttccttcgatttagtacgataaaagctgctaatttcatcctttatttcattcatttgctctaacttaggcaagtcatcgtgcttataaagtggcaacttatgactaagttgctcagagacgctatgacgtatctgcactaaaaccgaatggacaaaattcaaagtaacatcgtcactcgacatctgtatacttattgggaactcttcaaaacttactggatcatagaagttaacttttacttctccgtaagtattatcgtaaaatggttcaactttatcagtctggccttcatcgccaagatgatattcctgacctaatgtctttaagaactcaatgattaaactcttcttttgttcgaattgcttgtcccaaaattcatcattatcgagttcagctaaatttaatgcttgaccgctaaattttcctattaagttaatatcatcaatcaacggatgaaagccatcgtttaaaactagattccattgcggcttattatttgaatcgtagccttggaaataattaaactctgagctattatctttaagaaaattcagatattgtggaatatttttaaaagtattaattcttagttcttcaccacgatcacgatgataagcagatacgtgtaatctgttatcatcatacagacgcttctgctcatccttcggtagttttttaaaactatcgtttaacgtggcattccaaccgtactttaagacaagttcgcttggatccagattttgccctataacttcaagctcacctaagttaatcaacttacgagctttatcaaaagtttgatagtgattaaccaagattcgacctgtgtaagccaaatagccgtctgcatatccgtaaaccataccaactttgccgtttcttaaaattgttgcaatagtaaatcctgtagtcataatcaatttctcctttatttctttaaaataaaaaagcattaaaaaatgcttttcaatctcttactttttaacaattagtttctaggacttatgtaataccaaataaatggctgtccatctgcatcaaagatagtgcatgaattgtagtcaagcctacgatgtttttctacatcgaccttttcataagcaaccacagtatcttcatctgcaaacttctctcgaatgatatattcagagctgtcttccatttcatattttgcatcccaatgactatcaaatagtctagaatcagtggattccattccactaggcaaaatttcacggtaaattaaaatccagttgcctttcttaacattttggtttaacttaatttctttggttttactcataataattacctctcaaaatattgtagttagatttctttaaaattaatttcaataccttttactaaggcatcatcaatacctttagccttagacaaatcccaattagcaaagcgaattttgtaaccatgctgctttaacatctttagcagtttgcggtaattatccttaacttgctgattctcttgaaagtccatgtcataagcagtagtaaccgaagttacattaagcttcttaagcattggcagaaaatgcgagtactgacttacaccgccaactgccaaaaagtctctgccaataatatcaagttgctgctgattaaatcgcataggcaaataatcagtagcaatgattgctttcaagccgccttcagtcagccaaactgctttgggctttttagaataagccttaatttgttcaagctcagttgttttaccagtattaggatcaactttagtaggatctaatcgagcaatttctggattatatacgacagaaactggcgactgacttttagcaccatctttttgtttagcagaagatacccaaaagtatttgccgcccttttgcattttaaaagcatatttcatgccggcataatccaaatttactacgtcttgatctacaggtactttaccttcagcaatcacagtagcgtccttcttcccaatagcagagtaaagtaggactttatacttacgtgtgtaactattgaagtctacttttagcttgccaccaagtaccgatgaattaatgatctctgctgtttccttaacatgatcaacacgtgactgcatcccaatgatttgattatattcattgtaaaatggcactagcattccaaaaactttaggagcaaatttaggtatttgataagttttaccattgtatgggtattcaacattataaaaacctggtactccaaaccaataatcatgagtaaatttaggattaccggtttctgtttttagattatctaacataccattccataaactaataatctttactggacggccgtctctgctaggctcaatcttagcttggctaaagtagtcgacaacatttccatttttatcttttttagtcgggtaatacgtacccaaagcacgcttaccacgaagattaatcatttcatcagtcatgcctcttttatgcaggttttcacgatgcttatcgcataatggatagcacagcataacagcacgataaaacatatccaaaatctcaggcttagccttagggtgtgtaattagcggtttctgcttacttacatcgaaagacactttaaagttcttatccaggtaatacatataaccgccagtagcttggaatggatggttattagcctgtctttggcacactactttggtaccagtaacattaatcatgcaccagtgagtaccgccacagataggacaatgggcaccatagaattccagccaataaacgggatgctggggatctttgtaatccgtatcaatcatgtccgtttctcttaaagcaccaccaagtttttcttcaagctcagcatacttactttgtaaattttgcataacaataattcctcccaattaaataattagtaatcaactcttcttggcttagttaaatgatgaagccagctatgaaaaccaacttttcgtgtactaagcgtatgtttacaaataacttctgtcccatctgaattagtcagacagtcatctttactgccacaaagtggacagcgagaaagcagaaaccaagtttgttcctcttcttttctttttcgaccataagacgttaaggctttatgatcatttgattcttctgaatacttaaacaatacttgtttagacaacatagcagctccttaattaacaaaacaaaaaagggctttaagtaataaaaatcacttaaagccttttaatttactatttgaattgaacaataatttaaccgtaaaacgattagataaacaataactcagctaaacaactagcttacaaccaaattattaccaacaatggtaataacgttaatcaaaatgaattaatcaatattcatttcaattatgattatagcatgtttagcttaatgtcatgggaaactactattaaagccaaatcttcaataagcaaattactacaattacaccaataataactgatggccaaaagataatctgctttaaactaagactactataaattttagcggacttaggctgggatttaacaactttatagcggacatgcttctgtgaaatcttaggagagactttattagtcaattctgtattttctaaattctttttagtagctggcatactacctacaaattcaccaactgctaccgttctatgttgaccatagccatattgattaacgttaaaatcagaacaagtaataagagtaactgttttcttaccagggatgttattctcaacttctacttgcttaggagtaatgtcatagcgcatattagtttcaacatactcatagattctatgcatgtctgtaaaatagattttatctccggctcgtgttaaatgtagattatctaaaacagcagggccgtaatttcccatatagtggccggcaaccacataattgtttgttcctcccattactctattaggaactaccgtacaaacgccataggacaaattctgcaattgagcgccatagccttgaaacaatgggttatgaatatctgcggctggaattgacattcggccaattgctccagccggagttttacgcgcatcccataactggcgagtatctacatctgttgttttagatgcatcataagtagtctttaccttacgattcttatcagcttgttttgctgttaaattttcagatgctcgctccccattatcacgcaacatgtaagctctccccactttgctgttgaagaagaagatcgacaaaccagcaacaagcaagatagtacctacaatcacatatagcgaatcaaatattttggtactaacgctttttctttctttttgttttctcattgaactttctgccctttctatgagaattccctgtatgactatttgttttttcagaatcttgcttatctttctccttaactagccacttggcagaattaggatgagcagcaatgtaatctaacttatacttatctgaaaatgaccaaatcatacgaattaaccaaatcataccaatagaaacaattacgatggcaaaagctaatatagcggccaaaagctcaaagagccactgtttagtaaaatcccaataaaagaaaaatactaaaatacaaacaccttgaattaacaacataacttgttgactggttcttagcatagaatcccactcatgtgagtataatttttgtttgaatttctgctttaacttcattttgctttctttacccactgttcactagttctagtttccaaataaccatttaaatgtaaatgcaccacacattatcaagcccataattaagccagcgccaaacataattaagccattagttacaatggcaacaaaaagttttttttcttttttcatggtgctatcacctcagtgaataaaacagctagtcctgaacctacaatgacccaaagcattgttgtatatgctgtcctagcttttcgtttatagatctcttggcctgtcattgtataaacctgtaaataaactgtgccaaaagcgtaaagaattattgatccggacattgaaacaaactgaccaataagcattactgcaaaagctgttagccggccaccagataaatttggcgaagatgccatagctgtaacaaacaaatgtatgaacataagaaagccatagatactaactaaaacacctacaccctttcgcctagcttcacctgaattaccaatatttgaataaatcatgtagcccataccaattaaaagcataagaactaggataacatcgccaattctgattaatccaccccaaacctgtgaaaaaccggtattaaggatatgaaagccattactacctttttcactaaagtaattatttaattgcgagttattctgatcttttacatattggccgatatcatctgccagccaaatgaaattatccaatttacttcaccatcttcatgaacttatcatgactaagaaaatacccattatgatcgcttagatcaaaataatgaataaccttgccgtcagtatcagcatttcttagtggcatagctattgcagaattttctgtttttactgctaatggctctaaatcaagtcttagcatttctgtctttttctcttctttctccataacaatatgtttaatcctagccttaccgttactttgctttgctacagattgaaccattgcaacgatttgatctttcggtaaataataattgaaattatgtgttaaggagtattggtcaaagttaactacccactgatttttaaatggacttaaagtcacaactatattttgcaaccaagcttcagataattgtgataatgaataattggaaacaatatgattgaaaacattctgccaagtaatcacagaatcttcagtactcatattcacaaaattcttaacaggaacgttcttatcttggggtgcagttaatccaaacttacatttaaattgatgattatgtgtcataaataactccaagctatctatctgagccaaactcgttgtcgccaaaataggtacagtttgacttaacacatgatcaatttgttcaatttcaaagtgatcttttttgttgctatgatatattaagctctctgatggataaatcatgccatgcttaaagagcaagcgattacgtttacttaagtcaaaaaataacctagcactggcttgatgagaattctcaggattctcatagagcttaattatgcccatcagacttactaatatttctgattcaaagggatgctgataagaatcatattggtcatttgaagaataatcagaaataatttgaattgatcttaaccgatgacgaaacagttgaattgataaaccagttgctggtctttcaataatctcacttcgttcagcttccatagtttgattcaaaattgaactaagcaaattatcattagaaatagcatatttaacattattcgccttaaatcgacaagtaactttgatgctgtcataaacaatacctagcatatcaatatcagcatcaataattatacgagacaaaaatactttctgatatgtcattaaatatgacgaaaccatattagaaagaataaaactaattgaactagttaaatctgaagttatttcagtcgtaggaacatcacttgaaaaagtaccttcgatgaacgaattttcatcaaagacattataaacaagcttaatatgtactggagcgtgtttagtctccgaaatatatctttttaatgcagacaaagcaagtggaattgatttaagctttgttgcaaattgattacataccattttattaaacacatccttatatgtgtagaaaaaaagagacgttattcaaaataacgtctctttataaaaatagattatagttaattatgacttctcacttgagcttctttccatattttgaaagcttttggcccacgttcggcaagaatgtcatacttatcatctttccaggtcggaaaatgatttttcttaaatcgctgccactcggaattattgatgttgaaatacttgcgaatctgagaatcggaaaagtcttctgattgaagcaagatgtagacccattcataataaccaccttttggattacgaatgtccgttttatttttaaaccaataactaatggaaccctgttcactgaacaataccttgtagttatgtgcatctttgcccgacacaccagcgacttctctattttcgctttctcttattgccctctcacgacaacgtaatacggaacatagagcgcaaccgaccaagcactttttcttatgttcagcaaaagtttcatcgccaaatacacgcgtttgaagcaaattgcgttccatcgctgctgatggtaagtcataatgttctgtcgtcatatctcttttaccccttttttttacaaaagcgggtacttttctttgaaaaaaaacctaaaagaactcttattcagagttcattatcattttaatctcgagcagagtgactgtcaacttatatttttcataaagtcttaataaaagacacgttacttaacttccatgatttttttattatcatatcgaagttcaatatttttatatgtttttagtactttcaaactaccaaatttcatattaatttgagttggcgaatctgatgaaaccttggtaggttcaacatccttgggaatttcaatatcgccatcagtaccatccttatcaatgccaactaagctgtatttggttcgttctgatcttaaagcaaaaatatcatttaaatctacagtacatttaaaggtacgatccttaaaattaagtactggcttcgaccaatttatactacccttagcatactgattaggagtaagtgaaaatgctgtagaaatatcttttgcgtcagtaataactgattcaattggataatatgaatttttagtagaaaagaaattactacttgtaccagaatcatctgattgttttaatctcatagtaaacggagcttgtgtcatgctcggcttaccctctaatggcacagtaataatttcaaatttaccatgtggtaaacataaatagtaatttcgataagccggatcaacttgcaattcatcacctgtcttattgactaactcaatatctgaaaatggtattgcaatgtcagtattagtctggttgtatgcctgcaaaataatattttgcggttcttttttatttattaagacccacatacgaaacttatcataatcagaatcttgaaactgatcttttaatgaaggaatatcttctccttgttgcttagcattatgaacctgctgcatatattgttttatatcagtgtagtaatccccaacttgtttcatgttagtagtcaggtcactcttagttttttcttggtcaaatgaagcattcatagtagtggctttcctagttttcccattatccattgtgtaagtaagatgtactagccgtaactgcttcttagttaagtttgtaccaagataaaaagatagtgaatcattaaatgttgaacctgaatccaattgctcatgaaaatcagcgggagtattaggcacactaaacggtttaaaagtatgtccttgaatatgcaaagcaaagtttcgagatgaaacaacagttgaattagtacccgtatttctaagcaaaacaggcattgtaattaaccctgctgattgtgataattgcccctgacgtaatgagacatcaacagttggctgctgatgttcatcactaccactaacatcaggcgtagcttcttgactagcacaagcacttagaagcattggagcagatagcaatatgaaagatgcaattatttttttattaaatttcattttattgcctcaaaatatcaggaaaaatatactgacgtaggccaccagtcttacgatcaggtaaaaagaatgcttgtggaaggccttttctagtaatttctaatccaactaaaaataaagaaggaaatgcaaatttgctaagctgtaaaaactcattgatttgctgcgctctctcaatggtaggagcataaaaagccaacacattttgacctgccggcaaatcatttatctgcacactcagatcttggcccgctttagtaaatttattccactttatcgttgcatctttatagtaatttagattgtcattataaagagctggataaaatactaaattcttaggctttccctgcgttaactccaaattaatttgaagtgaagagggtaataatactttctttttatgtatatctccatggaacatagttgtacttgctctataagcaggtagacttactaggacttgataaacatccaatgtttcccaaaatcttaaatggtatctccaatttaaattaagaaaatcctgcggatgaaaataatttgaattagagtaaaaagtttttaaaaaacgatagccatttcctgtgagcgtataaacaggcacatctttaccatcaataggatgatgatatgtccatcgcataattaaaccattcctaaataatttatttagacaatgatctagatttagtccatcaagtaattgcggaaacattctagcttcacgtttaagttgtagcttttgaacactcttaaacatagcaataaactttaaccaatattcatcctcaaagtctagctgtgttaggacattattatattgatcagcaatttcatattgacgaatttgacggacagaatctcttaaatcaacataacctttaatatagaaattccgatgtatctcgaagtttttttcgtcttctgggttaattaaagaaggtaacattgcagtgccattctgtggattaataaactgactatctttaattggtacaggacgcatacttacctgtttcttatcatttatagtctgcgacatgaatttgcctcctttacagaattactgttcgtgaggatctggtacacgtacaactccgtgaggaaaccttttaatccatgctctaccggtatgtgtctgaggattaattttctctaaatgaacaattacgggagtatgctgttgtgcatctgctactgacggcttaattggtgaattagcactcagaatacccttgcaccaccaacctggagctacttcaacaaaaatcccttgaattggatgataacgaacgatatagcctttgaaatcagctccccgttcaaacttactttctacatctttatcaggagattccaaaaatggtaatctggtagttaatacttgatacattaagcctttaggaacagctctccctgcagccatatcttgcttaacaccatcttgatcttcatatttagccttaatgatgttagtaattctaaatggaaacttcatgccaatataagctaccttgtttaatggcttagtccacgtttgataatagaaattcttggccaacattcctaattctgcaccttgatattcaaatgagataaaccgaaaatcaggggtatcaatgacctgcgtaactttaccgattctatcttgattcttaactgcttctggatctttaagcattgcttgataaagcagaccattaatcacaaattctgcttgttgaatggagccaagagcaatatattgttcattaccctctttgtcctttgtaccagcgtcaagaaaagtagtaatagcaatcttaattctctgatcaatgaaattatcaggatgacgataatttgagcctgcttgactagcgaagatataaactggagcatcattttcctctactcgcatttttagtacgggcatcactaagccctttctaacttcgaagtctgatacttcctcacctactgcccataacaaattatctggcgtaagttcctgattaatttgacgtttatattcagcaataaatccttgtagctcaaatggaattttttctgcttcatcaagaaagaatggagctgtttttttatcaccattcattaattgatgttgattttgagccaaagtatttaacgcatcaaagttttcatctgccatatttttcacctttcatctaaatagttcactatccaccttactaatttgcgcaaaaatatggtctaattgcatagagcaacaaggttttgaaaaaaagtaaaaaaaatctatcactttcgtttctaagtggaattttttttgtaagatatacttgtcaattcgataaggtatgaataaaaaagttaattcactttcgttattagctatttttattttgtactatagacttgatcattgaatgaagaaaaaggagaaaaaaatgagaaaacagaatttcaaaaaagtagtagcaagtgcagttttaactattggattaatttcaccaatggctatgacaaatcaaagtagtaattttcttttaggaacaaccaacactgttcaagcagccacccgtaaaattaaacttacgcataatgcttatatctataattatcgtggtcacagagttggaagaagagtgcttcacaagcacgctacgcatatttacttctcagtaaagaaaattcatggtaaaaaatattacagaattggccataacagatatgttaaggctggcaacgccaaagtagttaagaaacatagtaaaaaaattatcaaagaaactacatctgcagtttctaaatcaaacactagtgtaaatcctacttctactaatactaattcgttaggttcacctatttttaaggttcatgtattcgccggcggtaatgatgtatacaagagttcatctgataatagttggtttggagccaaggattttaaagatggtatttacaacgtttatgcttccaaaaatggtaaatacgaaattggccaaaacttatggatttctgaagatgctggtgagaaagttagtgattctcagcaagctaattctaaaatttctggcttaaatactgcacatatatccaattcagaagcttccaaaactaaaaataccaataactacaaaccaaatgagcaaaatattgccagaatttttgtaagaatggttaataaagcacgggcacaaaaaggaattgcccctctatccattgataactcattgatgagtatggcacatactagatctattcatgatggtaatactttggtggcaactggtcatgaagattatcattatggtgtcagcgacaatgtggcagaagtagcatctggcttaaatgtacaaagtaatgatacagcagtcgctaagcaagcctttgatggttttatgtaccatgatcaggattgcaataatgaacatagagatattttattgcaatcagatttaactaagataggcgttggtgttacttatccacgtggtaatgacagccaatactttggttcattagttgcagatatgcaataaattttacaattaaactacaaaaaagagaggatcaaattgattctctcttttcttattatctgatttattaattagattaatccataccagcggtttgatgacggcgaacatattcaactactgtaagcccagaaattgatacgagacctagagcaattaattcaacaaagatattgctcttagcattaccagtttgtggtaatgaaccattgtcagaactagtattattactttcctgaactgaaggtactggtaatgcaccagtagatacttgttgcggagcattagattgagctggagcagaacctgatggagtattgtcattattttgactctcattttcaacaggtgctacagccttcttttgcttcttaacaggcttttgaacaggtttagtattcttaacaacatgacgtttaacaggcttacgagtctgaacatgtgttactggagcttgatcttgtgaactattgttattctcagtaactacatttgagctattaccagagttggtagtttcattaccagtagaagtttggttatttgaccctgtattatcagagccattattttcggaattattaccttggttattgtttgatccattgttgttagacccgttattaccagagttattgccctgattattattggatccattatttccagagttattaccttgattattattagatccattgtttccggaattaccattgttcgagctactattgtttgaactactgttatttccgttgttgttgttttcattattattgctattgttattattgttgttattattgttgttattatttacaacaacagtaccaccatgacttccacatctatgatggacgatcacaggaatagtggtatttctgtgatagtggtcaataacaatagattcactggcatcgttcaagtcagcatgttccataagaattctgcccttatagtacaaactctcaaatgctaccaaggtatgacctacatatggcattccattaaacttaaaggttaaggttactgtaccattagtcatacgaggtgtaaaccgaacagttgcaacaataggaacaccattttgaacaactggtaagccagttacttgatccatcagcttaccacgtaaagtatattgttgaccaggaattaaataagtataacgaactacatcttccgcaatattctgcgtcttaggatatacaaacttttgcgtattgtaagacaaagtagtatgcatttgtggatgagttacatgtaaggtttcactttggtcattaatgtctctatgatcggttaggaagtagccggtgtaataaagagtttcatataccaccaaatcatgatcccaataatggtgagcatcaaatgttactgatgcattaacttcaccattagcattttcagcagtaaaggttttactaaattctacttttttaccattattaagaactgccttacctgattgcttatccatcacaattcctttaacagtatatgttttaccaggaattaattccttataataaatagtatctgttaaagtttcaccatcagttggctgcaattgatttccatttgtttcagcattaatagccttagtatgaatttcaggtttagaaaagtgaatggtttcgtgtttatcattaagatcttggtgatcaactgaccaatgatttggcttatcagcacgttcagcatggctaaatacaaccacgtctttgcctgctaatgatgaagcatctggaatctttaattgcaccgaaacattgtcttcaataccatcatcattcttatcattattaggtgagccaatagtcttttcaacttcaatttgcttaccatcaatagtgataggttgaccagttgctttatctactaaccaagctttgacattatatttaacagtacctactaagtgggccaagcgtaattgttcattaattacaaccggtcctttaattggttgagcgaacttgctattatcttccaaattagtagcttcagaagttaaatgtaagtgcttatggttgttaattggtccttgtacagttaagtgataagcccaaacttcattttcaccatctttagttttcgtaactttagcattttgttgcaagttaggaagagtcaaatcaatatgaaccggagttggatcaacgtctaagtttttaccagttgaatgttcaatagcaatataatggtgaaaatcagattgtggtaatacgccactcttggcaacaccatttttatctgtagtaatagtacctacaaatttacctttatcccagcctgaatcatcggtacattgataaatatcaaatttagcttcaagaaccttatcattctcatcatcaaccttattgatatcaaattgggcatagtttactttctcatgatgtggagtatgtgggggagtatgtggcgaagtgtctggggtgctccagtcataagttttctttgctgtaccatgcttaacagccattaaagcaacaccattttggtgaacattatcacctgaatagtaaacagcagcaacagtattatatgctggaacctcagcagtaattgtaccagtcttagcattattatttaatttagcggtaaagttagttgcagttttaatttgtttagtatgagctgcaccaccttgtgttactgttaaacctttcagtttaatcgacatattacgtggctttttaattagcttcttattttcacgaacatctgcaataagctttctagtacgagaggttttagcagctggggcacctacttgatgaattgataaagtagttgtaccatcaccacgatatgtagcatccttataatgcttcataatgtaattataacaagcttcagcatgcttgccaccagcagtttgattgaaagtaacatgaccaatactaccagctaccttccaaaccgcacattgtgtgccaaattcaaaagctttagcatcagcaggcataccttttccaagcttatctgccattgttttagaactgttagccccaaaaccacatcttaatacggcacgaacattaccattatcatagtgattaaactgttccttttcaccaatatttggagtatatttcattggttgcaagcagtagaatctcaaatcatgatccccatgccagccttcgtgaactgtatcttgtttgccacttggtgtcgtaacagtaccataatatccttgacccattgagtagtcttttacgatcgaactcattggaactttatccaagtgtttaatagcaaacgccttttgagtagttccaaggaacattggtaaagccatcgtgattgcagacaagaattttaatcctttatgttgttcttcaactaaagaattttgatagtcttgaacttttttcatggactttccttattctccttttcttaaaaagattaatggcagtagccccaacatgactgccaacatgttttaagcgataagttttgcaactcatcgtaattgataataaacgttactttttgaaaagagtttatttgtaaaagcaatcagaaaaacaaaaacaatttgctgaataaaataaaatttaacaaaattagtttcagccttgatactagttagattgatcataaagcaatataaaaaaattttattttatttatattttttataagttttaagttgaaaaaacctaaataatgcactactataaagaagaattaagttttagatttaattacagaaagaagttcaaaaaatgacccaaagtcaaaaaaatgttatgtacgtttcaaacgatttaggatatggcgatgacaaaggtaaatttggcggtgtacgaatcaaccaacctactgtttttgtccgtatctatgaaagtccaagttttgaaaatgttgactggaactcaaccgatgaactagatgccagagtaaagtcaattttcaactatctggatgtctctattaaagataaaagatatctaaccactgttgccgcagctaattctttaaaaactttaactacattaaaggatgatgcaccaacaggaaaagcacacagcgatgctgcattaatcatcccactttctttaattgccggtagagcaatacaagaagcttatgcagaagctaaaaagaatgaaactgaatttgacccagacgaagtaattacagtaaatgtctacatgactactgctcttccaattaccgaggctggaactaaagataatgacattagacctgaatacaagcaaagattcatggcacatcaacattccgtaacagttcattcattgggcaaagatattcaagttaatatcaaatttaaagatgcaaccatctttaaagaaggcgaaattgttgttgtaatggctatacagcacggtcccgctgatttccaaaagaaattaattaataaggttaagcatgttaagctggctgatggacttttttttaatgatgatgcattagcagaaggactagttaaagatgctgatagcttcatgggaattgatgctggacaacatactgtagatatttcactctttaacaatggttcagtaaacgactatagtcaaagtatcaatcaaagtatgggtgacgttttagatgatgcatttaatatttatcaacaacaaaatcctaatggtacaagtttaactaccagcaaagattttaatgatatttggctaagagctatagaacctgaaaaggaagctaaaagtgctaaagaacgtttagctgcaattacggaaggaatgctaaaaaaagacgttattgaagctgtagatcaaagcgttgaaccattaataaaccaaatcctaaccaaggttcgttacttaattagcaaaaatccaaaattacaaattatatttatctttggtggagcttctattccactaattgaacaatatcacttagatcaaagaattcaggatgaaattaatgctaagaagatccctattcctgttgtatgggttggcaaagaatatgcacaaaatatgaatgaaatggcgttagagctttttagtgaaatgcaaaaagcacgtcaaaaataattagaaaggagtagacgatgggtcgtaagaaagaaaaaagactagtaggcttcacttttagtagtaaaaccgagccagacctagcagattggcttgataagcaagacaataaaactaaatcaataaagtttcttattagacttgccattgcaacgtatggctatcaagacttagtatcattaggtttgttacacactacattagctctaggtgaacaaacaaatgagaaaactacttcagcgataaaaatagaaaataatgattcagaatctacttctaatccagttaaagctgaaaagaagtctactgtgtctaatactaaacatacaaccgaaacaaacagtaccaatacctcacttaatactgagaaaaaaccgattgaaaaatctgtatctgacattacttcagataagaatgacaaaaaagatccatttaatcaattcggtgtctaatgtaaaaaggctagaaaaatttctagcctttttttctactcaaaattctataaatcagaggaatcaccgtcccacaacatcttgttaatatcttctggtaataatttttttgtattatgttccctttttttacttatttcttgtcgagttttacgttttattggtttaacctttttatcttttatttgagactttgaactagtttcatgaaattcagtcttagccttgttttggctaacattagaatgctgaatatgcttatcttctttatccgtctttgcctttttgattgacactacatcattcttggactcattaatgtttttaattgccaaattagctaaagcatcatttagatcaacattgccaaattgtttcttagccaagagtaacgccaaacgaactgttttcgacttatttttttgattctgtaaatatgaaattatctcatcagatttcgatgctttatcttgtaaaatataaaatttacagttaataacttttcttttcaaaatcatcacttcatgactttagctcgaactactaacccatcaaggtttagggtttgagcatatttttttctgacccaaagaatataaggagcattaaacggaaaaagattttgaatcacatctttaaatttatcatgaaagtgagtttttaggacattagcaccgcctccacataaaacgaccattccaatttgaccatgtaaagccctgtgaaaatctctaacttgttcaataatttgacgttctaaattagaagtttgctcatctaaaaaactcttatatactttactttctttgtcattagggcctttatctctattagctattttaataaaagtttgtctgtccataggtgcaataactggatatttttgtctcaaggcatcaatagcgttttctgctgaaatacccactccatttagaatacttcgattttgatttggtactcttatccctttattagtaacagcgaaatcaatagtgccatcacctatatctataattaaaacattacctgcttttaaaatatcttctcctgtgaaatcagatagcgcatattcttcgactaaatcatcaaaaatctcgccttgacgataatttaacctttctggatcaaaaatcaaacctgtaattgctgcaacaccttctggatcaacaaaaaccttcttaaatgataaatctacatgtactaaggtactaaaattattaatggttaccagatgatgataatcagcaaatcttttagcatatgactgctgcacacccttaattttaatctcatcaattggtaaagcagtagcaaatttatcaactactacatttaaattagttggaacataattataattctcaaaaaatttcgataatgcataatatgaaattatactaaataagcaaatcaagccaatatcagattcacttttgccctcagaagattttacattgtaattaattggttcagttccagatattgaagcttgtggtcctacgaaatatcttccgttatctcgtatagctggactctgaactttaacgtccattttatctatgaaatcagctaatgttgcttttacattatcaatgtcattaacatcaatggcttcaagttccttacctggtagtacgtcagacataattgatggaaaaataaaacgaagattattgagctgaactttcatgaacccattaccaccgtcagaagcatcaaccatgtgcaaagtattattatccgccacgttaaattcaccctttctgttaacgctatatcaaattataacgacatcttgcctcaaatttggttttatttaagtaaaaagaaattgaagaatttttgctgttaaaattgtctcgaaacatgagatcaaatttaacaaaggtggttaaaattaatgcaagttctatcacaagaattattacaaaaatatcaaaatactggtgccgcctatgaaatctttcatagctatcacccattagaggatgctaataacaaattagtttacaagaaaactgtgccagataatttaaaacaacatgtagaaaagccagttcaacaaccaaataatccgcaaaacaataacggaactccagccactgatcaaacaccacaaaatgaaaattcatatgcttacggaaatggtacacagcagccaaatgctaatgatcatggctcacatagcagttttgtcaaaattccacctaggaagactactcaagaatcttcagttcaaaatactaggactaaccaagtaccaacagaatacgacagtcagaacagcactgcgaatactaatgatcaacctcaatcccatactttcacaatgcctaacctaaatgaaaatacaactactgaacaaactgaccctaactttcaagaagagaatacagtacctcctgaaactacggttaatgagcaaccgcaacattttagagccaataattatcaagcacagccaactaatgaacaacctgattatccagtcaaggcagagcagacacaagcctccccttcagtttcgccaaatcgccagcttccaaatcaagaccgccaaattgatactcgcccacatagcgtattggccaaagaagtggccaagagcaatcgcattaatacaataaatgatgaaaatgctgaattgtatgaacaaatagctcatgtctcacaagagttagattggattcataaagtcaactcgtttgaactggcttacaaaaaagatttacgcaacttacctatccctgctttgcgagtatttaatattgaaaactctgaagaaatgatcttaccatttaatgatggttctttactgcatgatgtttcaagcatcacaattactagagatatggtcattatgctccttttccgtaacaatactccacttaagcttgtaccagagggttggtacaacaacggtaacaatcgtgacattctaataaaaaatggcttcaattacttttataagagtgtcgatgcaaaacaattaaaggaaacactaaaattattaagtgtaaattactctagtacacccgaatttactcaatttattttaaaaacgatgccttttgttccaatacaaagtaactaattcaacaaaaaagactccaatttggagccttttttgttagcttaaaactacttatgttagtcatcaaagtctgtaaaattattgctttgaccatgaatcgccttatcatagtccttttctaactgtttaggatcatctgcatcttcccatgaataaggatcattcttttgctcctccgtttcatcccaactttttttaattagctcacccaacttattaggcaataaatcaacattttgtttcacttgtttaagttgaacttgaacgtctttaagatcaacattaatttgacttgtcttatcatccttttttattggagtttcatttacctctttattcgctacctgacttaatgaatctactttgctagagagtaaagaggcagtagccttaaagtcccttgcagtatcatctattttatctagaactttctgagtagccttagctaatgacttggaatcaattgaagctataggtttagaaaaatttttagattgagtattttgaaaattactattttgttgcttcttatttttatcaatagtctttgaaataatgtatttcagatcgaaaacatgtgttggaaactgtcaaatcttttgtgtaaatagttctttctcgtaaattgattttttaatcatttatttaatcaaaataggattctaaggtatcctgaacctgaccaaagcctttatgaattcggtcgaaatagcggtcattgtagctcattgcctggatgccaataaatacatcaagcgactgttcagttggaaattctgccttaggcttagctttacgcttgatgacgttgttaaaggattcaatcatgttggttgaataaattgaagctctgatttgtttgggataattgtagaagaccagcagatcgggctcaatttccctcaaacctttgataacatggctataagctttattccattttgcataaaattcatgcaagacagctgcagcttctttttggcttgtctgttgatgtatctgcttgaattcgttcatgatcttttcgcggtcatccacccggactttagcacagatattgcgcatgacatgaaccaagcagcgttgaaaatgagctttaggataagtcctggccaaggctgttttcatgccaacaacaccatcagaaagaaagagttcaacttgcttcaagcctctggacttcatgttttgaagcatctctgtccagacttcaatgttctcactaggagcaatgcagtaatcaatgacttccttatgtccattaggtttaatgccaatggcaatatatactgcttcacgctcaaacgtttctcggcgcaaaggaaggtatgtcgcatccaaatagacacagaaaaacttgtcgcttagcttgcgcttgtgataagcctcaaccttggggagcatctgcttggaaatatttgatacttgagctggactataatgactgccatacattttctcaatcaagtcagcgatttctctggtagttacgcctttggagtagagcttgataatcgtgctttccaaaacatcagagtgctgcttgtagtcaggcagcgtgtgctgatgaaactgaccgttgcggtctcgaggcacttgcacttcaattggtccaaactgggtatcaaccttgcggaaataagcaccatttctagaattgccagtattccagccatttctggcatagggatcatagcccagaaaggcagtcaattcagcttctagcaagttattaacagcctgttgtagctctttgcgcaataaatcgtttattttgtcttgattgaatagagcttgtgctatatttttggtaaaatcattcatgaaggagttcttctttctgtatgtgtttttttgttcaaaccaatcatacgagaaaggaactcctttttctaatgttttaagaaataaatttaaggaattattcatccttacacaaactattttacagtctcatgtgttgaccaatgatacttagttatatcatattgggtcaagcaaaattgtgattttattaaagtaaaatacatccctacataagttacatatggacttaccgataataagcgattaatatcttttaaagaataatcggctaatgcagcggtatctttataagctagccaagcaaaaaataaggattgatctggtatctgtgcggatgacagcatgttttcggctttagatgcaataaaagctaattctgctgaatcagaattagcatatcgagcaatactaaaggtatctgcttttacctttaagtaaggttgaactaaggcaaaagaaacatcagaatcaatataaacttcaatatgacttttaacaccataaatgaacaatgcatagaaataggtattctctttaaaaactgacgcaggcataacggtaatttgtcctgcagtatttaaagaattaatttcttttttgctttttttactccaagcattagctccatgcaacttccataagaaatttaaaatgttttcagtgtaatcagtggctttagcaaatgtcaaaatagccttgtcaatttttggcaaggccatttttttatcaattttaacttcagtaattaatttagctaatttattttttggtgcctcaaaccattttcttaagatattcaaaataccacgataagacttatcggaagcacagtacataatccgcaaaagtagagttaatgaaccacggctaaattgaacattatgactaagacccaaagaaaagtatgtatcaactaacgtatttaatttttgattatctccaactacttctggaatcaataaaagctcaggacgcttagcttgattacaaaacacaacattgatatgtttcttttcagcacatttatctaaatccgcaatggaactatcgtttaaaattaacagtttagaatttttatctagctttaactgcgaagatatgggacgatgattccaatcaatagaaaccggcggttctagtacaaattgacgtatcggcatttatctctcacagcctttctaatagtcttcatcatcagtattgctagtcatacctggctgactattaaatggatcacggtcattaaatggaacatctgtatccaatttatcagccttcaattcatcccctgcattgtcattaggctcatcatcagtaattggtcgatcctgaaaactttttagcatttgttcaagatcatcgcttaagccatttgcttcttggctttctttaactttatgttccattgactgcacgtcatcagtttcatcaatagaattatgcaagttagccaccttatcttgttgcttatcaatagctgtagtaattcgagcaataattttgtctaaactagctggtgtaaagtatgtcgctaatttatcacgctgttcttccctaaatttcagcatttcatttagacgttcaggttcagttagctctgaatcatgcaagattttattaaacccactttgcatatcaagcaatgcactgtgttttaattgactaattactgcattttgactatttgcttcatgttcctgccttctacgatcatggttaggtaaatcaacgaaattattcatactttcagacatattattatcttctttcttatcatcactatgaattatttcatctttattattaacttggcgatttgcagataaatccttatctttcaacttagattgttgctttggggattggtttttgctttgatccggttttggagcattaccttttttgctactttttactctatttgtgcctgccacatttgaaactaaaggatcttcatcatactttaaatcattgtcatttctgccattaccagaattaggcgatttatgtacagacttatccaacgcacgcatccctgctgttaaggaagattcatcgtttaaatcagaattgtctttgacagtactacctactttattaactctactagttgatgtagagtccttagtcttcttcgtcacaggcttggtgatttcttcactactatcgtcttctggatcagtatccaatagtgcgtcaactttgccctcatcgttaaattgatcttcatctaatttttgcttatgcccgccaacggtagcataagcacctgttccattccaattatcaaaaggatcttgttctatgtcttcaggactagggccatctttatcagtacctaacgtacctgccttgcccgtagattgttttttactttgatgacttaattctcctgctttagtgaccttagattgtttagaatcagagttttcactaccattagcaaaagttacttttgttttatctgagtcagaatcttcatctgcagtattaccactcgaaagcacattaccttcactatcaagaatagttggtaaaacatcatcaccagatttcatttcttgatcacttggccactgaatcatatattgtttgctttgaattaaatcaataatgtgcttatcggtatcactatattcttgactggagttcaccgtgtcagcaatcattacttcataagcattcctatcttctggatcatccatattgaagtttttaggatcgttttcgattgcttcactagtgattctaccaacttgaatgcgatcaaaaatgttagtaccatgctcgcctggcgttctaatggccatagtatatttctccaacttcataatttggttagctgtaatatttggtactttctcaaccttagtagagattcgactacgattctgtgattgatcagcagccaaatcaatgtcctggtcattgatagattcaactgcttcatcgtgttcaccgaacaatggctctaataacttagcgtcatcaggccctaaatcaccgaaagtagctctcgttagcaaaacggacattaatgtctttaaataatcaggaccaaaggtttgtgacagttgggctaatgattgtgcccctaagttaattcctgtaccaaacttacgagcctgggcacagaaatctgtaaaaccgcttgattcatagtcagggaactcgtccatatataagccacgaaatgggtcaacgttagctgtacgtctaaacgtagcagcttgaaaagttaaggaatacatttgacctaagatacttgctaatgggccacccaacgatttcttatcggtattacaaataatgataccgccgtttttaaaccaatcatcgacattaaaatctgagttctcacggaacaagacacgtcttaatccaatctttttagaaatatcctgtaaagtagacttaagcccgcccacaaactggtctttagtatcaacatagactggatatcccttatacttaccagtttgttgaatcttagggccagtcttgtattgctccgcaacaatgtaagtttgaaaccatttaagagtttcaacggcaatatcataggtgtccttatagttgaaatatgtagccttatcgtttttatcgttagttttgttaaatttctcttttgctttatctacttctactcgtagaatttctacataggcttcaagctcagttcttttcttgacggtaacataaacatcgaacatcatatccattagttcgccaaaactagctggcttattttcgataaccgcagttaatttaagcaaataaacataatttgccatgtaagaccgctcttcaatactaaagaagtcttttgctgatgcttttaagccggagaaaatatcagtcaggttttgggatgcagcgtcaactggcccactcagtaaccccaaagaaggtgtattaggatcttcaggattaaaatagataatcttatctttaggcacacccttagcaagacagtcttggtatgctgtctcacataaatcattggtaggttcaattaaagtaaatccgttagtgtacatgctttgttttccatatggtgcattccaatctttttctttagaaataattggatagccacgaatgtattccaaataagcatcaatgtcttgatcaatttgcggtctaaaccaggatgaagttttccccgcaccaattggcccgataacaattgaattacgcttacgtgcttctacgctctgaactaccaaatctccagtttccagtgaagtacccaaaaccatatttgcataatgatcttcttccttcacctgcttagcgttttttccagaaagcatttggtgtaatggacgataatgaaactcatagttagccatccattctcggattctaggttcaaattgtaagactaatcttacaaaacgagaatgcagataaaacatcgaaattattgctacaccaactaataaaagcctaattatcaaaggagaaccagttatttgatcaatcatttgagtagtggtgcctttaacagtaggatgcaaacgaagaaactgcaaaaaaggtatagcagttaaagaaataggcaatgcaagggatgcaccaacaatgtacgacaactgcttaaatcctatttgtaattcatcccacattaggtcaacacgttcatcctgctttttgtcatctcttcgtgttgttaaaagaattagaaaccagttaacaaaacaagatgctggagcgctcagcgctaaaattagccagcaaaataatgtaaaaacggagaaattaagcgttccaagtggcaaaataatttgaaaaagacaaataacccatattacagtgggcgctatccatagcagtgttctaagccactcaaaagtctctctcgctttttttaatgaaattccatctaaaacagaagtatatgtattcagcttctcttcaattttttgcttaattttctcgatcactaaaaatcacatcctaaaacaatcatttttagtgtaaaaaaaaacgccctattaggggcgtactgcgaatatacttgaaattattatatttgttcaagctgatctgaaattttaattcaccttaaagttgcttaatagcaaaggactttagaaaagtgccttagcagttttactatcaaaatgaatctttttaagaaactcagctctacgctttaaagctaggcgatattcttttgacattttatttcctttagtttctgacactatgattacctgctcagtataatagcgcttatttgtaggcgtgcggtgcgctggaaatattcccttgcgatcccattcctgcaaagtacgtactgtaactcctaaacggtcagccatctctctaggtttaagcatagccataatcttcacctccacatattgcctttgataaagattatagcacatgcttctatgttattctatgatcttctgctctttctctttactacataatagctaatcattcctttctccgtttttcactctacagaagagtttatctcaaaggtatgcctagaaacgaaaactaaacaaaaaaatcaaaaaattatctttttaggaagtggaaaaacgctttccctatctgaagccagccgttagtttgctgtggctcagttaacgcattagttgttcctactttcgcttgttgaaaaacatacaacaaagcaaaaataattactaaaattaataataagcctataaaaatcagccatacattgtaatgcttcttctgattcataccttaatgccctagcaacttagatgatgcgtcaatatcagcaggatctcgtagaatcaagcgagcagccatctgagctgttactattggacttctagaatctccattaccgaaccagccttgaattttgctttgattacctttcatcaaagctgcagttgtggtttcagaacatccaagcgaaattaacatttgataaatatcggccttatacttatcaagctcttcagtcatattaatgtggtttctggccatgtaaatatccctcttcctcattacctgcattagcaacagaaccataacgataaaacattctttttaaagtcttatcatgtccgctgtaataagtaattggctcacgaattttcttaactgcattattgcttggaattatcgggactctatttagtaccttacgatcttttctagcatttaataaagctagtaatttgtgaataaagctcatctacctattccctttgcttaaaaatctgatacggcaatctgactgacgaaaaagacaaatactgcaactactgataaactagcaatccaaatacttaccaacattgatttataataccaagcggttcttcgaataaattttcgcaatgtcttacggttatcaatcgtaaagagaatttgaagaatgaaaaagaaaatcgtaataatatagatttcccgcccaaattgtgtaatccagcgtggtgcatatagtaaagctaagcctaagatagaaaacaaagtactgatctctaaatcaaacttccagttttcctctacaaaggaatttaactcatcacgctgaactactgcattaacgcaaatttcaaacatccataaaacattaataacagttaagatttctgttgcatatgcagaatattgttgcaaaaaaataaaaaatgtattttgtgacatatttcaattatctccgtatttctttgatgttatatacaggtttcgtttaagaatttagcctaattaacaagttgattgcagatagtaaaaatcagcaaaaaagcggaaatttgaaaaatctccgcttactttattatttaattttgttgcaacgctttagaaaaagctcttctttgcaacacccatagctgccaaagtagctgtcataattccaccaagttcaagacccattgaacctttagcattaccagtttgcggtaaggttgaggttgaagtatcacctgagcctgcagcagtaccggttgaaccagtaccagcgcctgaattagaatcacctgagcttgcattacctggatcacttacgccagcattattagctgagccgttgtttgctccagcatcattgccagtgccgacaccggtgttaaaattatcaccatcaccgttgccattaccaccattgcctgaaccggcattcttgttcgtagcgttatcagcggtattaggatcaccgtctgaagatgcaccattgccgttgttagaactaccattattgttagttgatacaggagttacaggagtagcatagttgttacccttatttgaatgtgatgacgaaccattgcttccattacggttaccgctattgccattattatcatttgatgtagttgataatgaactgccattagtagttgtacctgagcctgcgttaccagtattgcttaagttgttgcttagcaaactggaatttgagttattattatttgaattattatttgagttattgttggaattattattgttattatccactaataacgaatcaccccaaccgccaaaaccatccaatcctttaacaatggtttgactatttgatgatgaacttgacttattatcacctttagtggaagtttgtgatgaactttggttatttccactatgacttgaagtattgttttcaccaacaccgttgccagcaccagtattaaccgccataaggttagtggtcaaaccatttaagccattcaaactgtttaaaccattattgttatttgatgaattgttagatgaattattgttattgttgttattatctacgactaaggcaccgccaccatcatcataatagccatcccatacaacaggaactccattaacattgtagtaaggaacaccgtttacgtagtaaacgcctgctggtccttctacagcatcttcttcaccatcgccatccttatcggcattggtccatcccattgatgtcatcttattagggtcagcatcaccaggattaaaacgaccttcggctgaatcaccataaacatcatcagaagtatcacttgctgacttgccattagtgttttcagcaatattccagtcggtttgagtgttatcagtaccaggttcgatctcataatcaggtttatgtgtccatgaatctgcggcctgatcaggactttgaaactcccaaccaattgaactatgttgagcttgattagtgtcatgagcagtatcgccagccacatcattgtaagcgtctttatcggttacaacggtttgagtacctggttggttatcaccaacacttggcttcgtattaatgtcttgtgattcaccagtatcagcgtgagcaacgactgacatcaatggactagcagcaacgcctaatccacctgcagcagcaatcagcgcagtaccagaatattgtaaacttttagaaatactcactgtgtaaatcctctttctttcaaaaatttgactaaaaaacaatatgagctagaaagctttactttttagtacacataatgaatttaagacaaaatcctaaaattaagttcctacgtcaaattagatgaaaaaatttagaaaacgaagtactaaattgattgctactgaaagtactaaagataagctcattagtaagacaaaagctgtcataattttcaaaagccaagcgctaatcatagatcccaagcctaagaaagttaaaactgacaatattactagcacaataagataaagtgcaataaatgcaccaaatgcattatgcaagtctgctgggcttaaatcaaagccaccaatgacgatattagcaattataatcaatccgattagcatagtaactattgaggtcatatccatgttggcaaacaagttaggattagctataacttgctgaacttttagcatggaatatgacgttgctgccttttcaaggcttaatacaaactggtacacattaggcattgtggttttcaaaacccaatagattgccaaagtacatccccaaattggagcagttccaataaataaattacccatattttgatacgtggagttggcattccatgtttgtcttacatagcctaaagcaccatcgtttcttgcaacatttctgggaagaattaacggtttaaattcaacaatattgtgtccaaagattagtgccataacagcgtgactacactcatgtataaaaatccctacgcatcctaaccatatttgggaactaaagccatatttacgtactagtagctctttagaattacgattgatataagttagaccaagtacaactgcggttggtattaacattgcaataagcaaattaacaataattgaaattagttctgaatacattttttaacctctttggcccaatattactaaaggcaatgaactaatatgatatctgtaaaaattacaaaaaaacgagtctacatcagtagattcgggtgagagtcggttcttaatatttgttagatttcgaaatcttcttcatgggtatctgggttagtatatatgggtatatcttcataagaataatcatctaatggatcaatattatatttaactttatctccatctattgtagtttgcccaaaaacactatatggtgcatttagaataaatggtatatatggcatttttggcggaagcatatcgccaaaacgattctttaaaatagagagtttaattgccttttcagggagtaatttaacgtatcgcatggcagaaggaatagttaccctatgattttttattgcttcagcaatagtaatttgtttaccttctttttcaggaaaatctcgattttgttcaatagctttctcctgttcatagtcaactaaattaagatctcgaccactactaatatcattaatccatacacgattaaaatcattctccattataaatacaacatcagctgtatattcaatgtctccactctctttaaatgctgtttcatcaacgtcaattgagctatagctagaacggttaaatgaactaattacaaaaacgggaatttttaaagataatgataataattttaacttattaactgcagctgtaactgcttgtttatcagtatatccatgatttccttcaactggccttaaaagttgtaaataatcaacaaaaactaccggattattcttagtagtttgtacataatcggttacttctttaacaatttcatctactgatgggcgcttagttaatggagaactaataatcatattctcagaaaagctattgtaatatgccatagctgtacgcaatttctttttattttcttcactaaaattttctttaatgtgccctctcataatgttacgtgctgtcaacggtaaatcactatgttgagcaatattttgaataggattatacgtatcatgatcttctgtaagactccaagctattctactaagtgatttggcaattaactcattagcagacatttccagcgcataataaattacttttcgattttcatgagatgcaatatgatttgcaatttgtagtgcaaatgtagttttacctaatccagacgttgcccctaaaacgtataagccattatatagtccacttcccaatcctacgttatcaagcagtagaaatcctgtagaaataggatttggggtatcctcttccctaatgctttttatgaaatcaccatagacattatttgtcattaagttggtcatactattttcctttaaataaaattttgaactaattaatcaaaaagattaccaaatgctgaatctatcatggaaccactagaagtatggtttttgacagtagatttatgatttttcttttctctattgaaattatcgttcttgtcttcttgtttctttttatcagctgatttaacatttttaggcttaatttttctgaatttaccattacttgtatttggcgtatctttgtcgcttaattgtattttttgtggtttaaaagtaaaggtatatttagacaacgttgctctgccaacttctcctgaacttacgtattcttttttacatctaagattttgagttaaacccttctcatttagttctttgattgcagggttaattattctcacatcaatagtagatctctgaccacttctacgataacttttaggtacatccattagtttgtagaataaatctctttcatatgaaaacttgcctgtcgttttccattgcatgatcagagtatataaacgctgtgaatatctagagtttaatgtcattaaattagccagcacaaaagaggtataagtggcttttaaattacgtaaaaaaggtatcaacgttttattagctaaaacccatatatcttcatcttcctcgctaatatcaacattagttataggcactactattctttctctgtatttacctggtacatctgtcttttcaataaatttggcttgggttaggtcttcgaacattttcccaattgtattacttaatcttcttttcgataaatgtttcaaatctgctagttgtgcaatttcgttgtaagaaaaatgtataccattctcaatgattttattatcagattgattagccatctgacttaaaacagcccaaatacttttatttcattttttgtcaatccatgtaattccaaggaattaatttgatttgcaattttagctatatcgtgacgctcaagtttttttcctcgtttatcgtatgccatatgcagcaaccttcctttctcctttggagctattatataattaatccaataaacatacaatgaatattcaaatgtatgtttatgtggcttataaagtggagaaagtgtattaaaacttgaaaccctagtatttatcctccctaataaacatgcattatttaaatttatgtatgtttattaaatgactatttggaaaaatcgtatgtttattttgaaaaatttggcaaaactgtatgttattaggacatatttgcattgatgcaatgtaaataaacggtctataaacattaagaacactgtgtttaaaagtaaacagagtctttatttttacaaaggaagtttgcttggaaaaactgtatgcttattcgattttcttttggaaaaactgcatgtttattcagctttttttgacaaaaccgtatgttttattcagttattctttggaaaaactgcatgtttatttggagaaaactgcatgtttatgaattctgaccactacagtaccaaggcttctacgatctgcaaagggctttaaagggcccttcttaaaagggcctctttaaagtgaaaactaatctcgttaaacctcaatttagtttaatcacaatgcatcaagatccacacaaacttaaactagaacatattcaattaagatcaagctaagggttacacccttagaaacctgtgcaactcattcgctcctattaaacgcagcaaagctgcttattaaaagtcgttagaatgagttaaaaatgcaacttgtaatcatttgtttaatttgacattaatttcacttagcttaattaaatctaaaagaaataattctacgaacccttaaaaagtttagctatggaattaataaatccggtaaaccaatcggaaaagtggaaattagttggaagagtatttgatttattgttattaacaagtttatgtgcttttttattaatttgactgactaattgactagcttgaaatttaaagtcactgtttagtgaaccagaatctctaacattttctaataacttgaagatagcgtttttttgatcattgttaatagcattatctaaatgattgttactgagttgattattgattattgctttaatttgatcatttgaaacgttacttttttgattgctcatatcttttttagcttctgcaatagctttatttaattgggaatcagagtaattattttcccctttattctgattattaatactactgagagtgttgatttcatcttgagcagcatcaatttgcttttgatttaaattagtatcttgttccttacaagccttatatacaccagctaaagcatttgaaccgtcaattggaactgcagaagtaatatagattttacaattttgaattccagcagttaaagcagcattggcatattgatcttcagtagtggtagttatgttgtttttaccgtgatatggaataatttgaacttatactccatgatttttagttttctgaagcatagcacttgaccaaactttagagttaattgtgaaattgtttccagcaggatttaagtatttaactaagtctttaccggtagtattggtttcttgataattggccccatgtaagaattgagtaagaactttgatagtttgttgtctttgcttgctttttaaagaagtccctagagcaattaccggtattgtcgatagttcactagtatcagctttgaccgtagttgaattcaaattcatcaagctagtaagtattgtaagtgcagtaatcgaaagaagtaaatgcttaataaatttcatgtttttgacctcgtttattttaatctgaatgttcaatttaattttaattacaagttcaaaattggttggtaatgtaagtgataataaaaatctatctgttagtaattggaactagtacgatagatttttcagtattcaattgcttagattgtttggttggtgaacggttgatcggacaaggtattgatgtaaataagttgttgaaatttttgagttgttaaattataagtgcctgcgtaaagaacaactaatttttttgctgattgtgttcctgtccaatgctttgaagtagatttaattagaacattacatagatcgttgttaacgaagtcaattgaagtagtagcattcaaaaattttgaatgtaatcgttgagcattaattaaatgtgatccatctttttgtttatcattaccgaaaaaatccggattggataaaattgattgctcagcgtagacttttgctttttctcctctgatgttatagctgctggagtcatcatatgtgagcataattttcaatagttgattagctgtataatctgcgtcatgttgggcagtgacttgtaagacgtttgatctagtttgccaagtttgatttgtgagcagttgttgggaaagtatggtggtgtaatgtagctctttaatagtcttggttaaattgtatcttttagcagtttgattgatttgaaactgattataaccagttttaccaactaaaaagcagaatacgagggcagacgctaaagttagggatgcagtaaaatattttagaattttgtagatcattttatatcacctttttattcagtagctagtttaaatcgagtattagtagcttgattcttgttcagattgtacttgacagttatataagctattcctgtttttctattttgaatatgtttttttaaggcaaattccgtgtaaattactaggtcaatggaatcgcttttagcataatatttagagaaagttacaatagttcttatattttgccctattagcttgtctgatgtgttaattttacttttatgtatatttatagctgtatgataaaaattttctccaaagtaccttaaaagctgttcatgactattgaaaatattcttgctatcgtgatttctggaaaatattaatttagttagattagtatatttagttttcaagtgttgtaattttgaattcagattgattttggagctatttagagcatgtatattcgttagacattgctttctagtgtgattatacttatttgctaataaaacgcttctatcggcttgaatttggctcagatcaaaagatgagctaaataaatagcatccccaacataggattaggaatgctaagaagtagaataaagatttttgcttgttggttgaatgtgctgaacctgattttaagttgttaatctgcattttccgcaccttcaaaaatattaccgaatctataaagttggctaaatctccctgtagcgtagttataagtacctaagtaaagatcttggcttgctgatctacgtttgttagtaaaccaacttacataatttactttaataattattggcaggttgtttttagagatgttgccggcagagaagttaagactacttagatgtgagtgtaatcctgagtaatcaatataagtagctgcgcttttgttttgattaaaaatctgcttgtcctggagaatattcttggcaacatactttgcggctttatcactgcgagcgagatactctttggcactactatagttgattagaattggaaataacaagttagctttttgttcagcttgtgtgcttgctgcaagttgtctggagcttcttttaataatgggatttgtgttgttcaatgcttcttgctgcatttgtacgtctaggctatgttttttatccgagatattagattttaatgttgagttagtatgtttaaggttagaaatttgtttagcttgtagtccttggccatggttaaagtagacaagactaccaattagcacaattactacaattagagctaaggtttgtaaatatcttaaagacatagtccataatgtcttatcttgacggtagtttctcatgattaattttcctctaatctaaagttgaaaactgcagatcagtattagatgcagtgtggtctcgatagttatataagcaagtaaggtaaaccacaccacgactttgatgttcccttttgtgtgttagataaaaggtagtataggcggtaattgtttctgtcatattagcaatatcaaagtcagaaaaagcaattctggtagcgatagtttgcttggccagtggggagtgattgctgtcaaagctattatctttaatttgactgtaaccactattaccgaagtatttaacaaataaatcagaatgcttagttaagtcgctgggcttcttagtcgtaccgtaagcatatttcagtaaagtgacgtatgctttgctgagtttttgctgatgcttggttaagtcaaattctcctctagtgattatgtttttcttaggtttgatctggctgtattttgttttaagctttttgctttggttttggagagtggcaatttgctgttgctgctcatgataagcctggtagcttgtgtaacagcttaaaagcaatataaaagctagagcgccagtgattccaatgtatacccaaggattaatttggggccaaaaaccagtatcttgttttctcatgtttcgattaggtcttctcaatttttatcttcctcgttttcagtttactgatgtttgtgtaatgctacttactttgccactgaagctatcaactacaaagctcatagaaaccctgattttgttaaagccatggggttgatactgtaaattaacgttaaagcgatagttatcatcatcggttcctttgtccccttgctcaatttcagcattatttactttgtatttagtaccaggttttggaactgcttctcttcgcattccaccatgatcaccgtgaactactgtcccttcatctgaagtaacattgacaatatcgttaaaatcttgtagagcttcagtatccttgtagacactgtttaagtcagatttgaagttgtcggatagattattcaaatccatcgtattgcttccagcagtttgagaaactgtaacagcttttaaaccaagagagatagctttgtttacattttgttgagcttgggatgcaggaaaagtatcctttgtttttttcaaatcttcattaacttggttgtgaaaatgaatttcatctcttttttctttctgaatcctggcaatcttagcctgacgaatagcttcttgttgacgtttattctgataccagcttagcctcaaaatgaaagcaataacgaaaactacaccaataattatccaagcaattgtactgcgcttcatgattaatcccccttagttaatgattattttttggttgctcttgcgaaggtaacactaccgccattcagcagactaccaaaggctgggccgattgtagatttattgacaccaccatcaccgcctgtaccaccttcttcgacaattctggtactattgccatgatatttttcaagcagaatagcggtatgtccatcgtctccactaccaccgccttggttaacaataattatgtctcctcggcgagctttgctcttaggtatagcgtgtaaccagtgatgtgcgcccttggcatcttgctccattgttttggtataccaacccatatttgcaggtactttatatcctgctttggctagagcaaaccacacaaaccctgaacagtctgtaacaccattcttgtttggatgcttgactgagccaatataggattcaccatgagactgttcatagtggaaccagccaatataacgtagagcggttttagcaatatcaccatggactgcaccgccatcgccaccattatcacaatcatcatcaccagaactggcagcatcagaagcacctttagcagcgccaccaagtaagctgtttttgcctttgtatttagcaccaccgaacatgcggtaagctttttgggcagcactttgtctttgaactttagttgcggcaatactagctggacgttcatatatggtttcccataagtaagcacattccgctggtgatttacctttagatgcatgtaagaattgttcatatgctcccttatatctgtggtcagttctaacgaaatcaccctcgcctttgaccgtccatttgccaaatctcttggtatatctttgattgacagattcgtcttcaggagtaggagtaaattggtaaaagccctgaccaccgccgccgccaatttcttcttgtcctggactaaaggttggatcttctgcaccggcaacattaccaataatgccagcagcttgagcaccagagagaccatgactaacccaatattggaaaatcgcctcggcagttttgtaagctcttgtgcctttagttgtccaagcccctccagcacctttaattactttgccagcatcgctagaatagtcctgacaatcgtcatcgttttgcttttgctgtaagtcccaaagacctactccgttaagtgatacgaaaaaggcagcaaaaataattattccgatactaatgaatactactgcatgtttcttaacaaaagggaaaatcttagccaccacccaaaaataaacttaaaaatgaattctgctcaaagtttaatttgaatcgtgaaatcttggggtattcgtaaatccttgaagcttgttaaaaatatgatacgttgtataattaaaagaagcacaagtctatcaaggcttgtgctatataaagagtaaaacttaattcacaaatttaagcacttggctattacctcaacatcttgactttgggtcgccaagcgcttttattttactttctatcaaatataaatagattatagcaaattatgcaagcaatttaaacaaattatttgaataataaaataatataaataatttatattatgtgttgattattgctacctgacataagattacccaaatatattaaatgctgattttaattataaaaaatatataaaaatttacattttcaatttaaataaaactaagatactatttcattaaacaattatatttttgaataaatactaaatagtagtaaagcctttaataattcacttcctaagagagtaatttgaaataaaagtcaaataaaagtcaaataaaaataaattaaacttatcataaacggctattaatgcttaaaatatagtgtaaataggtacagtaaaaaaatataaataatatataaacaaaataagatagcatggtttagattaaatcatgctgtcttttacataagaatagttcttagagtttatttggattgtttgaatttttgaaattaagagtatttcctaattagtttttttaactgtcccctcctttcatagcgatagaatgttgctggtggaacatgataaaaattcgcagcggcaagtctattcttgaaatattttccatttattttgatagttttagtatttaagcgaggattcttttgtaatgcacgaagtaaatgctcatcacggtagcccttttggtagtaggatctaaccgttgaataaggaaagccgtaatgtttagcaaatgtgcttatgcagtagacctccgttttgattcttatgggcttcatgacggtacaccactaatctttattgttatcgtcttgatagaacttatttagtagattggttggtttaccagattgtggttgagtatctttttcttgtggacgcttaacttgtggtatttgtgagctggttctattcataaagtcttgtaactcttttgctcctttattagttggctgccctgattctactaagttttggatatcattattgtcttcattgaaagagtcatttggattattgtctacgttaggggcaacgtccttgtgatgatttaattttgcttcagcgggtgacatattgctggagttagtattgtctgaatcttcacgttgggttgaactctgagattgattattggtgataacggctttgtttggattattctgttgttcttgaactttttgctcacctaaaatgtcttgtaatgatgcagtagcagcggagaattcatctgaacctgcgcggtaaacgaatgctgtatttggattattaagaccaaatacgccacgcttgattgcagaatcaactacagagtagccatcaatcttaattgcttgaacagtgtaagattcattgtaatgccccttcttaacaataggcttatgaatctcttcgccttgaacggaaataaagcgaacagtgatacttctttcttcaggagcatatttgattggaatagtttgatgagtacctttagctaagtcaaaacttaagttaatcttattaccattaacaggttggtatccatcgacttgtggcacatcgacagtttgtggctccttgaattgtccaataatttcacggctcttagtaaggtcttgattatcttcagtttgagcaataagagtaacagtgattgtcttaggaattacagtaacatcataatgtcctgagccatctaagcgtaattttgcatcagtttgtccggctggtaaaaagtagccaccattggggatttgactattaacatcaatgccttcaccatagtatccttcgtgcgctggaatagaaccaacgacttttttattcttatcaataaagttgatagtgtagttttctgtgtcgactgcatagacaatagttagatcttgggtagttgcagtgaatacacctttaatcgtcttgttttgggtatgataaccggttttaggcttaacgctgtattcaaacttctcagcagttacaccctctaaaatatcgtccttataaggctgttgtccatcacgattgccacctttaatgattgtatgaataataattttctgcttttcaggatcataattaattggaaaaatctttttatcatatttagcattgatatgaccgttaattacatgtttagctaaagaaaagccgggaatatcaggcattcgaacactaaaggtttgttttaccaggccagttacatgttgattataataactatcaatttgatgtccatattgatttgtggggattaagtcgaattcaactttttgcggttggtaagttaaatcaatatctaatctgccagcagtaaatttgctttttagtttgccgttagcttcaagaaacttaaaaccgtcaagttgctttggtttaaagtcataaggttgaccaaagtagcctgtaatcttatcatccggacaaagtgtattgaaagtagtgtcattgtagtgaaaaacaatgcttgctttcattggctcatagttaaagttaacagtaattggtttagagcctactaccccactagcatttttaggtatttcacgaagtaagaatccatcaatgtttagtggatcggttgagtaagtggagcctgccaattccttagttctttcagtatcatagtgtggaattggtttgtgagtttgggcatttaagtagtttacggttaatgaaacttcttttggctgataatggatttccctagtttcgttaggaatgtgaaatttgccagtaatttctttcttgggttgttggaagccatcaactgctggcagaataaatttgtatgtatccccccagtcgccagtttggattaatgtagctttagtattttgtagtaaacgaccagcttcatcttctagtaataatttaacggtacatttgattttatgataaaccacattgacagtcggattcttcatagcattgaatctgcctttgatgcgtgctttatctggaatgtagccgtcaataaccggaacagcttcattatataaattaccaactatcccgctgattaccatatcttcaccagcgctttgaccatgaatttcatcgaaccagcgcttaacatggaaagttttagttgcacgtttgaatcttaaagttactttttcatgttcttgggtgtaaataccatttaaaatttccggtgaactagctagttcatagccatcaatagtaggaagcttgatgtaataggattccttaaagtggccttgataagtcaaaggcttatgaacttgattcccgctttcatcaaagtagttaacttcaagggtagtagggattggcttatatacaagagtcagattattaacatctggactgtaattacctgaaagcttggctgatttagctgtgtctaattcatagcctttaaatttatgttgatttggcttaatagtgtaggactcgccagtcttaccgtgtaagtagaaatcattaaggctttcatgattagtgttgacacaagtaacatgcacgctattttgactagcaccatagacaacttttacttcgccgccattttgtggtacttggtgatttcttgatttgtataagtagtagcctttaatttttggcataactaagtgttgaatatcttcacctactacgcccttaaatttcttagccagtttaggattaattacttggttgccttctgttacaggcataattgtgtagtcgacagtatcaggcaagtagtttaagttaagatgttgctctttttcagttaatctgcgattaatttttaaatcgtctggtaatttgtagccaggaatattcggcaacttttcttttgttagtggctcacctactttgccagtaaagacaaagtcgttattaatcttctcaccgtgactgaggaatttaacgatgataggcttacttaccttttcaggtttaggcagatgttttttatttttttcaactaacttgccttttccgtcattattatcttcaaaagtcattgagccaagcttaatctcccttttgcctttttctgaattagaagcgtctgattctttattaggctcctcatctttagaatcatttttagtttgagcagtactttcgcttgtttcttcagcaactttatgattagtttcttcgacagaatcttcggtattagtatcatcttcttctgtctctgattggactggcttgtcgtcagttttgttctctttgtcttctgcaacatttggcataacagtttgatgatcagcattttggggcttaccagttactgatttgtcctctttctttttattaccaaataaatctgaaaacatactcatctagagttcctccttaaaatgttttaatactttcaacaatgcttattttcgcaggcatgaggggttaaaagagtttagttaattcaaactaaaaattgagaaaaagactaaaaaaagtagatttatcagtaatacacgattctcaaattagaattaatcccgtatgattgagtcactaccaagcaataaatacaaaaaaagcagtctttttatgcatttttgactaatattaactaagaaattatggataatgattggcaacttgctgttagaaatacacacaggcagagtaaaaacggggtattagaatatcaaaagccactgtaaaaaagctattaaattagctatagaccagatttaactcttaattgctacgataggcatgtaaacaataagattaaagggagagttgtatgaacttaggaattacgattattcagtctctaaatcaactaaaatttactgtgattgtgatagcgctactcatactgtttatcatttttgattttcatgctcatctaaagaaatcaaatgctgcaaagacggaatcagtttatttaaattgggataattctttaaataaggccgttatagtaatttgctttggaaaaagcaaatcaatgactattgcacttacgcaagagcaatttgctacattacgtcatgattttgaagaaataactgatgagctgtataatactcagaaaaattttgcagttgatgtgttaaataaagttaagcattcaagtagtagtaataaaaagacgaaagttgaaataccgttgactttattaaaaaagtaccaagcagatgaacggaaactaacgcactttgaacataagattgcttccaaaaaggcaggtacaaaaaaatctccgaataatttgagactgtaaaatagtttgtgtaaggatgaatgattccttaaatttatttctttaaacattagaaaaaggagttcctttctcgtatgattggtttgaacaaaaaaacacatacagaaagaagaactccttcatgaatgattttaccaaagattttgctcaagctctattcaatccagacaaaataaatgatttattgcgcaaagagctacaacaggctgttaataacttgctagaagctgagttgactgcctttctaggctatgatccctatgccagaaatggctggaatactggcaattctagaaatggtgcttatttccgcaaggttgatacccagtttggaccaattgaagtgcaagtgcctcgagaccgcaacggtcagtttcatcagcacacgctgcctgactacaagcagcactctgatgttttggaaagcacgattatcaagctctactccaaaggcgtaactaccagagaaatcgctgacttgattgagaaaatgtatggcagtcattatagtccagcccaagtatcaaatatttccaagcagatgctccccaaggttgaggcttatcacaagcgcaagctaagcgacaagtttttctgtgtctatttggatgcgacataccttcctttgcgccgagaaacgtttgagcgtgaagcagtatatattgccattggcattaaacctaatggacataaggaagtcattgactactgcattgctcctagtgagaacattgaagtctggacagagatgcttcaaaacatgaagtccagaggcttgaagcaagttgaactctttctttctgatggtgttgttggcatgaaaacagccttggccaggacttatcctaaagctcattttcaacgctgcctggttcatgtcatgcgcaatatctgtgctaaagtccgggtggatgaccgcgaaaagatcatgaacgaattcaagcagatacatcaacagacaagccaaaaagaagctgcagctgtcttgcatgaattttatgcaaaatgtaataaagcttatagccatgttatcaaaggtttgagggaaattgagcccgatctgctggtcttctacaattatcccaaacaaatcagagcttcaatttattcaaccaacatgattgaatcctttaacaacgtcatcaagcgtaaagctaagcctaaggcagaatttccaactgaacagtcgcttgatgtatttattggcatccaggcaatgagctacaatgaccgctatttcgaccgaattcataaaggctttggtcaggttcaggataccttagaatcttattttgaataaataattaaaaaatcaatttacgagaaagaactatttacacaaaagatttgacagtttcaataatttagaaagcaaaaaataagcattaatgagataaagctacattaatgcttatttcttattttgttttagtgctttgtactgaatggttctacgagaaagccatttagaataatcgtttatttttagtttccttaaattgtaatgaattcgatgaaatgttttatattgaacaactagtaagtattttgcaacatgaatgtctctaataccagtcagtccatagtcaactagtttgattttcttttgttgttgactagctattgcgttatttgccttaatttgagccttaatacttgctaatttaattgagtattgctcacctttgtatctcttacgcatcgctcgccaattttgaaaaatggaattattaagttcttgtgttttactccaaataaaattgcgttttctcaagacatcttctctactaatcgggtattgttctacatcggctttaaagtagatttcgtctccataaagcaattcttgggggatgcttttaaaaaaggagtgattaacatctagccaaatatgatctgctacccatgttttatcttttgcgtcatgcggagtatcagtacgatgaaattcaatttcatgatcctttgcatcaactaaataaagattcaatagtagtatgacagcttgataacgatcattttttaagtaatgggaaagatgatcgaatgtcgcatgataatatacgggtggctgttggaaatagtcacctaagataaatctttggttattcatttacatataaataataaataaaaggtcagtttaaaagtcaaaaaagctaacttttattatgattttttggcttttttaggtttattttcaaaggaaaagtatccaagtaactttccttaagaaccatagtactacggcttttataaaaagtaaagagtaatatcaatatcacatttatcgctttaaatataaggaaaatataaattaaatataaaattaatattaacaaaatatacaaaaaatatactcaatattttaaataaaacaggttgctcattaaatggagaatgtgtttagatttatcgcttgtttttctgataaattactaaaactgcccagattataatggcagcaaaactcaataaagctttttgatagctgaatttggtaagtaaatcttcaaaacaaataataaaaattgataagagaattgagcctccaatgaatatttttaagaaatctaggaaataataatgaataaatttacttttagttgtcttagtgttgttcgaattatgaaagacatctgataagataactggaaatattgctgatagtacaaaaagtactacatagtaataccaatgaaatatgatgaagccgatcatgcaatttaccttattagaaaaacatgtagtatgcaaaagcaactagagaagcaataactaaagcaataattaaatatgtactggttcggtcaaaaatatgattattttctttgcttttcaattccttgctaggactagaagaatcatgcttttcaaaatatctgatacttttttcacgattaataggctgcaagccacctgatctacgatgctcatgttttttttgttttgttgtcttttcaggtacttgctgtgattgatgcttagcattgattctgtctgcctcttcaggtgacagcacatgtatcgttaaatagtcaagtgtcatgttcatttcattatccataactgatattgatacggtgtaagttccagtgtgactgtaatctactttggaagtatctagaataaggtgttgcttatctaggtatatcttgtttccttgataatcactagcattaatatgtgttaattgaagtaaatcataaggattgggtaaattagtctgataaacataaatatcccttggatttactgatacttttggctcaaacatgtattttcctccctaaagtaactaaaaaaattttaagtgcttttaattccttactgtaaaaagctaaaaaaagcctaaattttgaaaaatacttgcttacctaaagaccaagtagactaaagacaacaagaatgtaaaaggaaggatacaattttgaataatgcagcaatgggggaagaaaaaactaaaagctttctatggaaaatttggacttggttatggccagtacttttggcggtaggtatggtgcttattgcacatcattttgtttattcggtacatgtgtcaggcccttcaatggaacctaatttgtacaatggcgaacctattttttgttttaagaaattcgtcccaatacatagaggatccgtagtttgctttgatgcatacggtgttgaccctcaatgtaagacaccgggaaagatatatgttaagcgggtaataggggtagaaggcgacacagtcagatctcataatggacgactttatgttaacgacaaattggttagccaaagttatatttcttcaagtcaaagaaataaggagagtactggcaactggaatttagcttcattgtcagaaatgcatttatggcactctcatacagacgagcaaaaagtacctaaaggtgcatattttgttatgggagataaccgaaaagtttcaaatgatagcagatattttggctttgtaccagaggatcacgtcttagggccggtaaaggtcttcaagttgaatacaaatgcaactagaagagacaatattaataaattttggaagcattattttgaggcaaataatgacaactagcttagatcaaaaaataaaagtgctaaaccgaaaaataaacttcaatatgagaatagcaacttggataaatttgacaatagggctaattactatcgtgatagcatttttttaataccatatagggcattcatgctgccaggtgttgcttcgttaagcttgggactttattatgtatatcgagagcaaagtctaaaacatgaagcgtggcagcatttagatgtgttagtcatacttttaataattaatttgttttgtggagctattattccagtcatttttattttctttgctattaaagaaaggcatcaaattaacaaattaagtgggaaatcatatataaaataaacttatcaattttatgtaaaatacataaattaaatatataaatattatataaataataaaagcggagaagatactaaaatattttctccgctttattgatatattatttagatattattcaattgaataaataaatttatgcaatcaaatttaaactaaactattgatatcaaataaaaatttaaaacaaaaattaacaatattttttatataaataaattaagttttaaatataaaccatataaaaactaattaagcttatctgcatgctgtgttaaacgagttttgaatttcctcacggcagagaacttaactttctgataatcatgctttttcttcgacttatgtctttgatttttcccaaagttggattgtttactttttactacgtcaaatcggccaaagtgtaggactaccactgaatcacctgaacttaggtgatctgctatctgatcgaagtaagtagagattatgttaggaagctgatccacagacacggtggtttgcttttctcttttcattttcttaacaagttcttctgaaatttcacgccctgtgaatcttctatgaccattagttatgttgctcatatttatccctcttatttttatgtttttcgattcattttctgtttttaggttacaatttcagaatttcattttggatattgcaaattaatcattaattttagcgaaaacactaaagtacttagaagtagagcaaaaacaaggtgctttcataataaaaataaataatatttgacaagcacttgagtataggatttatctatacattaggataaatttgcaaaatgaataataagtgcaataatatatgacagataatatagaaaggatattgttatgaatgaatttgaagatattgattttatgttgaacttagttaaggaaaagttgagtaatattgacagctataatatggctttagcaactatggttggtacatattttgctcataatcttcctgacgaagataaaaagaaggagatagtattggcagttaataattgtcagaaggccgctgaaaggccgttaaatcatcagtttgacgtttactttagaaatcagcttttgggattagtcgatgataaagaaagcaagaatcaattaattaggattttaaagaaatcttcaaggtggtaaatatgttagttaatgaattgagggaagttaaaactttcaaggttgaaagaaccgtccctttgaaagtaatttctcagtataccaagatcccaattgtaacattacgaaaatggatagaggataacgaacggttagataaagcacgatatacgtcaatccacaaaatgtatttatttaaacttcagtatgattactatttaaatcattttttagattcatccatttccttcgaagctgtacttaaaaaaggggtcataattgccgattccgataatgttttaaggagcgctaagcttttattagacgaaaaatacttatctaaaagtaatttttctttgaaaaaaattagcgaggaaacttgcattgactattcgttgcttaaacggtatcaaaaagatccaataaagttagagacgatagcatggactagagtatatcgcttagctaaggctaaagaagctattgatatggtagatgcgttttctgatgcaatatttaaaaggatgcttgataatgataattactgcggaagacacagaacgtaaaaagtacattctgaaccaattagaaaaagattacggtaaaaagattaactggaaaaatcagtacgataatatttattttttgcttactgatcttgaaaagcagacaaataaaggacagatttcaatacctattattgattttagaaatttacgtgtttatctagccaatcagttagatttttatccaaattatccatacgataaacctgagccaatggcagcagggcttcatagtgaagaagcagcagagaatcatttctttttgcatcccgaaacctatgggcgattacctaactatgatattgaattattttatcgagctttaacatctgagacgattctttatcaagaaaaaagtaaacaaatagaaaaactaaaagttttgcctgaatttctcgcttttttaaaaaatagcagtttaaagcatttatcatgggtttttgcttaaagagggtataagcggtgaaaaaaggtacaaacttaaggactgtaagtgttattgctttagtggcactatctttactaggaggttgctcacgaacccgacaaacaactaatcctcaagaagggtatgattcagaagcctttcatagtactaaaaatcaaaaaagtcagcttcaaaagaatgtaactggtgttactaactcagactatactgatttggctcagctaaattttaaaagtggtgaaaaatcttattgctatgtaaatcatgatcgagccaagcttaatccctatgattggaaaactaatcatgtgatttatcagcaacctgataacctaaatcgcacttcagcatctaatgtgggatacttagaacgaaggaatttagctaatggctcattgcgagttagacagtacatacagcctagtggctggcattttaatcacggcaagcaaatttataatcgtgggcatctaattgcttattccgtttcagcggggattaaccagcaaggtcagtattctcctaatgaacaatcaggagaccaaaacaatcctaagaacttatttacacagactgcatatacgaatcaaaagattcaaacaatttatgaaaataaagtgcggcaagcactgcgacaaaataaaaaagtaatatattcagctaccccaatttttagaggaactgaacgaatggctcgtggaattgacttgcaggcaattactactgacaagacattgaattttaatgtttatatttttaacgtacaacctggctatcaatttaattatcaagatggtcgagctagaattgatcatacttttaaagtcgatgggctatctgattatgatagcaatgactggaataaaaattataattctacattcaaacgtcatttaataaggagtagaaggtatctgaagaattattgggatgattatcagcattatcaacaaaagagacaacatctgcagcgatatgcaataaataaagaacgctaacgaaaaagcattatgataaaaagagcgccacatttataatgggtggcgcttttgttgttaaaaatgtttaaaaattaagattctatgttttactttagaattttttgttggatattgtatgtcatttgtcatacaatatagctgaggtgattattatggacgcaagagtaaacagtagagtacctgtagaagttaaagaaaaagctagtaaggaattagcagatcatggtttatcaatctcaagctttattcgcatgactttatcctctgtagctaaagatggatttccaaaatattggggtattcctaatgctgaaaccatggcatcaattaatgaagctatggatgacataaagaatcctcatctaaaaagtgcttcaacacgaaaagaattggaagatttattagatgagtaaagtaattcctacaagtcgttttaaaaagcaatataaaaaggtgaaaagaaattctcattggaacaaggtttttaatggcaaagtaccttttgagggagataatcgttctccgtgggactatgtaattgattgcttcttgaacgatgaggagatacctgaatatttctatgagcatcccattacactcacaaaacagcagcgacaagagataaaaaatagatttaatgattcgctcaatcttgaaattgaaggactagatttacattttgatgggcataatggtgatcatttacttatttacaaaagataatttacttaactaggattggtacacactcagacattttttagaattaaaaaaggccagccaagattaactctcggttggtctttttagttagtatagccacaagaaaaattacaataattattactagtaatagattaagctctatgcttacgtgatgctaagaagcctaggcccaatgctgacaaggcagaggtaaagcccatgatgagccagttagctggtttgttacctgtttgtggtaaagcaccagtactgcctgagcctgagtttgatcctacagaaccattattggcattaccactgtcgtttgagccattatagctttgagtattgccaccattataattttgggcattcccgttgttagagttttggctttgtgaattttgaccattggcattgccattactattttggttttgaccgccggctgcagctttagcaccattcttagtgtaaactacattaattgtagtatccttggttaagtattcgtctaaaccactagcaagcttagcattgccattaagtgattcaggagttgataaccagagatattgaccattaatgttagcaagattcttatccttaagcgtatagcccttaattgttggagcagctacgtcttgcaacttgtaagctgggtcaactaagtttgaacgattgccattaacttcaagtacgatataaccttgaaccttagctcttctgatcttttgaattgcactgttagataaatccttttgagcagttacaggtgaaagattggagtatgtagtagtcttatctgggctaattacacgatagcggtatggatatacgtgaccaatgtgacgcttcttaactaagatttcacgattaatagtttcaaccttagatggagcaagcttcttaccgttttcgtcaacaaagttgatagtacgggtgattgggcctgaagctacaacatcatagcctctaacgccttcagtccaagttggatatgaccgcttatatgtaacatcaattactttgtttctgccggccttggcagtttcggcaggaatataagattcagatgctctgtaatacttcaaaactggaaccgtgtattctgcaaaagtgtgtccagccttggcagtttgggtgatacgtctaattgtgccatcaggttcatgtaaacgaatagtacgtactacgtcaacatctccaattttacggatcttaattggggtacgatctttgttcaaaatgtaatcaattgtagttgcaccatttgaaacggcaacatagccagttggcaaggtaatggttacgtgatcaccataatgtccttcaaggtgtgaggtttgtcctaaaacgttaccattaatatcaaccagatttacagtacctgagaaaacttctgctttacttgcagtagtagataaacgttgtgtagttacagtgttatcagcgtgtgctgcgggagcaggcttaacacttgctcctagaacactaattaatgtaacagcgcataatgaaacgataatttttttatgcattcgtatatgcctttctttcttacaaaaatttgtttacagttttgagtttataagaggtcgcatagcaacagctcttttgcaaagttaagctaaattttaaaaagggcttaattagttaaggctctaaaccataaaaatttagaatggcaaatcgtcatcactaatgtcaatgctatcagttccactaaatggatctgatgaagcagaggtattgtttgaattggaagcattagtattggtagtctgattattagcagggttattttgcttagttggcgttgaggcagtggtctgattattatttgaatcagagccagtattttggttattgcctcctgaactagaatcattgcgattgctgcctaaaaaggcaaattgatctactacaacttcagtagcataaactttttgtccatctttattatcataagtacgggtctgtagacgcccatctatgccaatgagttgtcccttatcaacgtatttgacaaaattctcagcgctttttcgccaaagaactaatgaaataaaatcagcttgccttactccctgtgagtttgcatattgacgatcaacagctagagtacattgtgcgacagcaattcccgaagaggtatgtcgtagaattggctttttggttggtctgccagttaagattacacgattaatcatttttttgctcctttcgctagaaaaataatagcagtaagcaaaaacaaagtaatatttgcaaaaaagggtggaaaaataccattttctaaatataattagaattttctaaaattaaatagtaaggaaagtaggtgggtaaattgattactggcagaaaaggctctcatagcaatacagcaactaatgatattatttttgataaagataaaagagcgatgattacgtcattggataagcgtcatgaagcacttatgcgtgataattcaattcttaaagcagttacaaacttagtacaggggcaaattaatcaagacagcgtaacaactgtaaataagcacagtagcaatgcaactagtactgctactaagaactatacttatactcaagtaaagcccaaagtagaggagcaagataatacttcttctttgaatttaaaacacaagattaaagataatcccagcacgtctttggataaaaaagatgttgcagtaccacaattgcctaatattgggcagggacagaggacaatttcatatcatagctttcattttagttaacagttaaacgcaggttaattttaagcatcatcgggatgcttatttttttgcaattaagtaagaattagcaaaacggtaaaaagtcgtaaaaatcataaactgattattgatactcaaagaaggtgaaaaaaaatatgattaaaaataagaaattgaagtcaatgattcatcgttttcgcagtaaaaataatgaatctaagactaaaaccaaattttataaccacgatgcagatactagccaaatgtcagctacctatgaagaccttaagaaatatggtgtaaatcatgagcttaatcttattaggagaatctcaatacagcaaaaattaaataagtatcagcatccctcttcaaatcatcgactgcttaaaggctatcgagatacgggagaatggcttaactggattggaatagtggcagatattagcatgccaacaactagttcattagacggtaaaattttaattgataagttttgctacgagaattctctgcatcaagttaaattgcttgattatcacgtctggttaaaaaccaatgaaatacgttatttgcttaatgccgataaacaaacaattggagtaggcgatacgattcgaggtatcagtaaagttactaaatactcaagcaaaggcttatcaaataaatatgggttaggtgctaccctactaaaaggagcgggtatttatgtatcaattcctactaagagaacattagctcaatctactgctaatcaattggttactgattatgataggcaagatgattgggtggttaaattaagtaatgcaggtgtccctaaacaaactttaagagattatcatcgagaaaaagatattaatgtctttattgctaagaatagaggacacgttagcgctagatttcaaccttctcgttataatcattattttgaaaggctagaagcgatgcctcaaaagatactgcagcatgaaaaagaacagcatagcttggcaagccaatattatggaattgtagataactttaaggtttatcaaaagaaagatagttgccatagcgtaatacatttctcgtatattgttgatgatattaaacggattattacaggcagcaaatggtttgagtacgatggtgaaattcttaagctgggtagccttagacctaaagacgtaattggttttaaggacaatagagacttaattaaaagttcagggactttagagccactaacgaatgtagaactgttaaccaaacatcagagtgatccaatgcctgataatcagagtttagtagctggttgggtaattaaaaattttggtaaacaaaaaaatgttttaaatcaaaatgatctagttaataaatatgaacgctggctcaaaactaaaaggggagaagatattagaactcctttcaatattggcttttctattgacgaaattgctgaaaaaaccacggttactgctcatcaaattcaaaaattcttggatcagcattcagtacagccaattttttctgaaggtaacaaggactactatgcaaagcaagatatggatttaaccgttaaacactttaagcaggttcataacaaagcaaaagcagctttacaagttgttcgtaaaactaaggataactatttaatcgataagaataaaaagcaagaagaggtgaaaaaaatgacgaataaagataattctgttatgaatactgatacaagtaaagcaaaaactactaaggctcccaataatgaccatgtaataaagattattacttcacgtggcagatttaccacattgcaatttaaaaccctacaggaagcatatattgtacttcagcaagctttacaatctggatacttgaattacttcataaaagccaaagatgaagcaggtagtgattgtttaatatcagttaagaatattataagcatgagctaaaaaaacgtgaccggcctaaagatgatcacgtttttgcatccataacataatgtgatgctgatgtatttttaatgcaaacattaagttttctcggattccactccgaggattagcctatttgactaatcattagcaattataactaattagtgggcgtaataacgaaaggtaaatagcaaattgaatcagcgagaagaatatcgaaagtataagaaaagaatagccaatgcgaaatattatcaaaaaactgttggtactactcaggggttaaaaaatgaacgcaataaaagaaaaagcaaggccaaaaactttattttaaaggaagcagattatgatgaattaaaaatgctggaacgagcaataaaaatgcggcttagcactatgcattccgactaaattctgagtgcagcattatagccaaactacacagaatttaggagctgaagtattgtaagctaaatgctgagatgtactgctccaccgccagcgttaaatccagtagctagaatatctttagttacattcaggggtttatctgataaagtcaagttcaaagagctaaatacttctaagtaattttgaattttttgtaaagattcttcagtattccctttttccgcttccattttttgaactatttgaggtagatcaataatactgattccattagggaactcagtttccaagccattatcataatctttcgtatccatgggtggaagcaatacgttagctgatccttcaatatctccaaagtcataaataatatatttgttagttttatctgggtttgattttagctcgccagtttgtggatcgtaaatgtctccacttgtaggatctacataagcaactttaccaaaattatatgctttattgatataattcggtgttaatttcctatctttatagaaattaagatgattattgttatcatcatctaatccataagcacttctgtttactaattgttgaggactttcatatgtccaggttgaagatgcagctactccaaaagttccatctttaaatttatctggtaagttaaaaacttgttcaacagcttttttattgttaacttttaaaggttgtttatttaagtattgttgaattttaagatgttcttttgaataaggtgagtcggtaactgcccaaagataaatatctttatcagtacccgttaataacttagatggatctgcaatataagtattgccatattgatcttcaaaaactaccttaggataagtagaaccatattcattaaaacaaaattcatgtttttgtccctttttatcaacatagctcaagccatgaaagtttgaaagattaattttaggcagattcccatgagaatctttagatagcagaatagtagcggagcctgatgaactttcttttccatcaacgactgttgtaagttcatctgttcctgaataaatgtggattcttcctaaaatttctttttctttatttgatacgtctttatcttttttatttgatggcttgatagttgaattctgaactttttgatcaagtactgtagcattacctttaactggttgatgagcattattagtattgagagtattttgatcattaagctttacctgcttttgatcaatagtttcagcatttttttcattggttttggcaggttgtttttatttttttaaacttgcatcacttgatgctttacgatttagattttgttctactgctgttgatgactggttcaaagtcttttgagactccttgggagtagctgttcatccttttgaactttttctttctcaacctttttttcattatttgaagaagctgtagcattattttcgacatctttagtttccttggttaaaggtgactttacattagaagcagagtcagattcttcactctcgactggcttaacttcgtgttttactactggagtagcattttggtttacagaatcagcgtgaacttcagaagtattggctgaacctaaaaaggcaacaccaatcaaaacggaagcagctccaattgacaactttctaatagaaaaatgttgaagtctttcagtatcttttttcattaaaaatcctttcattacaaatacatttgtacattaccgactatttgatagtagattttaaatgaaattcatggttaagctgttaataataacgtatttataaaaatgccattcttgctactgtgttataaattatgaagacttaaaatacgcgtggtgctagttaaatctttctagacaataagccaaattataagctaaaattgcaatttccaaccggctttgaaagcctatcagactacgtgctcgattgttttcggcattgtaataggtcagaagcgaaaagtcgctttcaattgttctgcgaatagccatcaattgatgatcattgtgctttttagctcctgtcatatttttacgatatggtgtccaaagttcataacccatttgttttagctgttgatgcagttctttgcctaaatagccttcgtcgccaagaagatagtaattagatggatgggtattttccatcagttcaactgtctccctggcatcatgaactgatgcttttgttacgacataatcaagaatgtaaccgtcatcgctaacaatgacatgaactttgaaaccatagaagtaaattttcttggtggccttataaccaatgttggcataaccgcgaaaaattttagcacgatagttgcgaattggttggcaaacaggtaccggaaagctgtcaatgatcaagaaatgtccattcaggtcaacctttttattcatttcttgccgtatctgataaatcaattgcaatagctgacgtgaacgtcgattaaaacgtgagtgtgataaacaattgaaacattcacagaatcttctttgtgattcaattcctgtcttagcttgccagataagtaaagccaaaatcagactgtccgtagttttaatttgatcaatatttcgccgatgagtaaactcagccggtgcatacaaacgataccagtgccgacaaattatcactaaatctttaaaactaacttgtaaatggtggctaaaacgcttaagcttaaggcagttcaatcagatcagactcttttctttttgatactacaacttgagtctagttcgattggacttttttattaactaaaacgatttaactagcaccacgcgtacttaaaatataaaagagtattcaatttgattttttattgtcagttaaagtacaattaagttggtagtagatttttaagaaagctgaatgtaagtatgaaagagtatgaattaaataacacaaaaatgatgggggggggtaaagcccccgttacgaataaagttattgttgcagccgcttttgtattacaaggatataactggaagaaaaaagatgggccagggccactttgatattgaattgaaatgattaaaaacgtaacaaatattgaagtggagtggttgctatgcaaagaagagttttggctactaaagaaagaatctattcaagcataattgaagaattaaagaaagctccgttaactgaaattactgatcgtaacataatcagtaaagcacaggtttcatcggggactttttataagtatttcagaaatcatacagatgcgctcagagaattagagaacaatttattaaaagattattcattcgtgttgaactctgatttaaaatattggcatgttgagaaattaactatggatagtaattccgtgaaacttattcaaaacaatttgaataatacgtttaaattttggaataaaaacaatgactacttacttgttttggtttcaaaaaatagtgacaaatatttctttgaccagttaattagtgaaactgagttacagaacaaaaaaatactagctaagtgtaaaaccaaaaccaagataaaaattacatctgataaattaaaagtagatgcatttgcacatcaattagctgcagctgaaattgagtcattcatttggtgttataagcatttagattatatgtcgagaaacgaaattaaagaggctgtagcagagacgattactaatgctccgtttaacttaattatgcagaaaaacgtagcataaaatttataaattaaatggtttagacctcatatttaagggtttgaacttttttcattaggacaaatttagattattatttagattgattatgaaagcaaactttaatattgccacttacatttttctaactaacttgactttgagagtatatagtgtaagataaggatgtaaacaataataaataaacaatatacaacaaccaatgaaagtcaagtcaaaataaataatcatttagacttaattagagtgagaaatcgctcagttggaagaaaagagacctttgttaatataaagatctctttttttatcctaaaattttgtataaaaaaaccacctttgtatgggtggtttaagggattaggcaatctaattataaataattagattgctataaagagactgaatatgtagcaactcctaagttacgtcgctacgattattagtatacagaataattaattttaatttgttacatgtaaattgtaatctaaaaaagagagactgtaaaatgttttgtgtaaggatgaatgactccttaaatttatttctttaaatattagaaaaaggagttcctttcccgtatgattgatttgaacacataaaaacaatacggaaagaagaaccctttcatgaatgattttaccaaaaatatagcccaagcactatttaatcaagacaaaattaatgatttattgcgccaagaaattgaaagagcagttaatgatctgctagaagctgaattaactgcctttttgggctatgacccttatgcaagaagcggctggaatttcggcaattctagaaatggtgcttattatcgcaagattgatacccaatttggagagattgaaatccaagtaccgcgagatcgcaatggcaagtttcaccagcatactctgtccgattataaacagcactcagatgtcttagaagacatggttatcaaactctattctaaaggcgtgaccaccatagaaatagctgatttgattgagaagatgtacggcagccattacagtgccggacaggtatcaaacatttctaaacaaatggttcctaaaatcgaagcctatcataaacgcagcctaagcgataagttcttttgtgtttatctcgatgcgacttatcttccattgcgcagacaaacttttgaacgtgaagctgtttacattgccattggtatcaagcccaacgggcgcaaagaagttattgactactgcatagctccaaatgaaaatatcgaagtctggacagaaatgcttcagaacatgaaaagccggggcttaaagcaagttgaactgtttctttcagatggtgtctttggtatgaagcaggcgcttcttgtagaagcttatcctaaagctcactttcaacgctgcctggtacatgttatgcgcaatatttgtgccaaagtccgagtagatgatcgtgaagcagtcatgaatgactttaagcaaattcatcaacagactaataaagccgacgctgttaaaatactgcatgacttttacgctaaatggggtaagttatacagtcacgtggtaagaaacttaaaggcaatcgaggctgatatgcttgtattttataattatcctaagcagatcagggcttcaatttactctaccaatatgatcgaatcctttaacaacgttatcaagcgtaaggctaagcctaaagcggagttcccgactgaacagtcgcttgatacttttattggcatccaagcaatgagctacaatgaccgctacttcaaccgaattcccaaaggctttggtcaagtccaggataccttagaatcctattttgaataaataaaacattaaaaaaacaatttacgagaaagatctatttacacaaaaaatttgacagtttctaaagtacataaggataagatatggaatgcttattagacgagatctatgtgtagcttttacaatcttaatcaaagccggtatagcttccaaattgacagtggtaataaaatcagcattatgtaccaacagttctgaaatttgctcaatttccatatttctaatattgtttttctgtttactctcataaacagctttatccaagtcttctttcgatagcatcattgttcttctttcttttgatttaggtttatttaattgttaactgactataccattaacataagattaaaagtaaaatgctattaaaattaggtatttggaaataataccactatagaatttatgcaacttcctaatttttttatgcatccctgcctatggtaaaatcaattttgaaaaagaaatgtggtgaaggaaaactatggcttactatgaaactttagctcaaaaaaaatacatgagctgggatcataatctggtaatcatgcaagaaataagacaaagtaatgacgctaagcaagaaactaagatatctgttgactataaggcaactaataagaattatgaaaccgattggattccgtatctgtttaagcaaggtgaaaatatagttactgtattgaaacaattggttcctattctgaagtccaacgcagatactatgttgccaattgttgaacttaatcaaggcaaaatcaaaactatccgaagtaactcaacaaatgatcaatttatgattgaagaatttctaaataagcacgatttactatcgccaagacaacttggtcacaaaacaggattaagtgttaatgttattgctactcagttaagcaatattgtacaagatcatagtcgaagcgaaatagggcttaagaaagaggatattgctaaggttaagttgacacaaaacgaatataatctattgacatcaaacgcaagattattacctaagtatgcttttaaaaaattagcagttaagcatattttggagcataaaaagaagcaagaaaaccaatatctaaaagtatttccttattttaatggtaaatattatgtagatatgtcttttggagaggtgtagtctaaaaatcgtggtaaaaatacttttcgcaagataaaagcatttagcggttgctatacttttagggatgctaaaggcaaacgatactcatttctgaaaaaagatgtcttagacatagtgaatcattctgaaattaaagcccaagacttgataagtcgaaaagaattatttgaaaaactaggttttactaagtccttgtgggataatcgaaaattgtatagcttgttaccatcatctaaaatgcatgtgagacttgatggagatgggaagaaggtaatgggttggttaaaatttaacgttactgagctaattaatcagtatcctgaaagattcaagactaccaaatgattagaatcctaaaaccagatgtttaacttactatcaaaggaaatattaaatgcaaaaattaagagaaataattacttatgtttatcctaaagctacatcagccgaaatgagaagtttaactgcaaacgttgatcgttttattaatgaggaaaaaattccgtttgtcaaaaaaggaaatacacggtacttcgacttagaagctgcttctaaaattcaagagaggttgagattaattacgatttgacgaaaagaaacaaagaatgcatcccttgaaggcgatacgattactctgtcaagattaattgatacgaatttttctgtagaaacacaaaagcaaaagaatagtttgaggacaattgcaaataattacattcacgacaatggaattcgatattcagtggctggtagaaatacaattatcagtactaaagatgaagctaagatcgtagaacgtttaaagcaagttcagcagcaacccgttaatccatctactaaagcattaaatagcaagcacaaagtttccgaaattccatcttatgatcaattactagagattattgctaaaaaagataagcaaatagatagtctccttgctagacaagaaaaaatagtaaaaaaactggaatcaatattaagtaactaaaggaaagtaataatcatttttagaaaagaggcattctcgatgtaatgagttatcctgagattaaagtccaaaacctgataagtcggaaagattatttaaaaatttctaagtccttataggataatcgagaattgcatatagtactttttttgatagttaaagaggaaaaatcaggatagtatggaagatagtaaagatgagttatacgtgtgtccaggtgttctttttaataaacatgataaaaagattaatgacttttttcaaaaagaagttggttgctagtaataattagtttatgctctggagtcataagtggaatggctttaccaattaatactcagtttcatggtttagcattattaggtgcctggcttttagaaatattaagttggctagtttggtttacgactattggaaaattaagacctcagtttttctgggggcatttaaatcctaaattatgtatgatgcatcccatatcagaacttcaaaaactcgttcaagaacaaaaagttcaagaattaagatttcagaagaccaataagcaggaaaagagcaaactaattttcttattatttcttcaaattgcaatcgtactgtggatgagtgttatgaatcaaattgatgtattaatgttgatcggcgctgttggattatcaggatatagcttgttttatttatggctacgaaatttgttctccagtattgatattgaatggggaaaatttaaaaaatctaattaaagagaaggtttagcgaatgcaaaattccattcgctactacataaagcagattaatttagtctgcttttttctgtcttcaacttctgaatacttgaaaatctgctacatagccgtttcctgactgttataattactaatatagataagcaaataaagatatgtagaggataaataatgacagaaaacgatagaaaatttgaggctacaacaccaaactttaagagtgaagcagcaaagaaaattgctaaactttttccagaagttgtagctgatgggcagattgatactgatgcactagaggaactactaagtccagacttagaggatgaagaagcaaatgaaaagtataaatttacttggcgtgggaaacgcaatgctaaacggatagcagatgctccagctcgtactactacattgattgctgacaagaaaagctctaaggattgggatgcaaccaaaaacgtttatattgaaggcgataatcttgaagttttaaagcttatgcaaaaagcatacagtgaaaaagtaaaagtaatatacattgatccgccttacaataccggtcacgattttgtttataaagataaatatcatgatccttacgataattatcttagagaaacaggtcaaatagatgcagaaggaaatgtgattactactaacagagaaagtaatgggcgctttcatactgattggcttaatatgatgtatcctcgcttgaagcttgctagaaatttattaatggatgatggggttatctttatttcaattgatgacaatgaagatgctaatttaaagaaaatttgtgatgagatttttggcgaaaataactttttagcgcaagtagtttgggagcgtgcttatgcgccaattaatttgaagaaaaatttctcagaaagccatgactatatcctggtttatgctaaagatgcatcaattgttgagacacgtggtattcctagaggcgatgaggcagataatcgttatagcaatccagacaatgatcctcgtggagtttggcagtctgataacttatctgtagggccagctattgagtcaaatatttaccctgtcacgactccctcagggagagtagtagagcctccagcaggaaggagctggagtctctcacaaaaagcttttcgtgagagactcaaagataatcgtatttggttcggatcagatggaaatggtgtaccaagaatgaagagattcctttcggaattaaaaaagcctggtattactccaatgactatctggaaatacaaagaagtaggacatagtcaagaagcaacgcagcaacttcaaaaattaatgtgtggaaagaaatactttgattatcctaagccggttaagttgattcagagagccgttcagctatattcagaaaatgattcgattattttagatttcttttctggctctgctacaacggctcagtctgtaatagagcagaatgcggaagacggtggccatagaaaatttattatggttcagttacctgaaaaaacaagcaaaaaatctgttgcctataaggatgactataagaccatacctgaaatagctgaagaacgaattagaagagctggcaagcaaattcaagagaagcattctgacatcaagcttgatactggtttcaaggtattcaaactcgaaagctctactattaagcaatgggatgataatccagataagttcactgaacagctagaaatgctacatagtccatttactcaagactctacgaatgatcaaagagcgttagaaattgctattaaaagtggcattagtttaactgcatcccctgagattgacggtgataattaccattttgtatcggatgataaagaagtatttgttatcttaggtaaatatgatgagaaacttttagatgaattagataaggaaagaaaattacctaatgctactgcagtaatacgtgaaatggacaatggctcagaaactaaattcaatttaattgagaaaatgaagcaggagccagaactgaatgatcattttagtttggagtggctgtaaagatgatactaaattacgaaaaactaccatatcagcataaagcagttaaagcagtggttgatacattgtctgatcatgatgatatggcaaatgaaatggtacttgaaccagaactgctcgatgagtcggtacaagcggctttattagataatggccaaaaatatccaggtaaggattatctaaaaccttttccgcaattcaatattgaaatggaaactggtactggtaagacaatggtatatttgcagacgattatggctttgcataaacgttttaacgaaaacaaatttgtcattgttgttcctagtagagcaatcaaggctggagtagagaatagtctggataagttaaaagtgtatttaagcgatatttacaacactgataagtatcattactttgtctatgattcaaagcaaatttctgaattgcagaactttgccggcagcagttttgaaattatgctgacaaccgtacaagcctttaacaaatcgactaacgtaattaatcaggaatataatgaaggcttctttggtggcaaaccccttgatcaaattagggatgcacatccaacggttatcattgatgaaccacagtctgtagacggagctaaagctggtaaagaagcaattgcttcgcttaatcctaaagtgactttacgatattctgctacgcataaggatcgtcaatacccacttttatttgaatttgggccagtacaagcctatcaagctcatatggttaagcacattgaaactttaggtacggaagtaaatactaatggtaatgtagctttcgttcagttaaaggaaaagcctgtgccagtgggtaactcacttcaggctaaagtagtagcttacaagcaagttggggatgaatacaaaaagaggactatcaccttaaatcagaacgataacttattcgaaaagactaggaacccacaatataaatctttgggccacgtaattgaaatcaatagagcagatgattttgttgaatttgaaaacggaaagcgggctactttaggtgataacgaaggcgaagctcaaatttggattcaatcacaaatggaagctttaatcagagatcacttggatcgtgaattagcaatgcaagatcaaggaattaaagttttgtctttaattttcttagatgaagttaaaaactaccgtgtttacactgcagatggagctaaaaagggtaagtatgctcaattgtttgagaatatttatccaagagttttacatagcaatcctaaatacaagaagctttataactataacgttccagtagatgaagtccatgatggttatttcgctcaagataaggcaactaagaaaaagccagctatgtaccgtgatactaaaggcgatactaagaaggatgaaactgcctacgatgccatcatgaaggataaggaggggctgctgacacaatacatccctggtaagccagaaactgatactaaagctgccaaacttcgtttcatttttagtcactctgcgttaagagaaggctgggacaatcctaatgtctttcaaattatgacgattactacgcctaaaaatgatcttacacgtagacaaaagattggtcgtggactacgtattcctgtcaaccaaaaaggtgagcgtgtttataacgataaacagaatgtcgttaccatttatgctagtgagacgtttgaagcgtttgctaatggtttgcaaaaggaatatctccaggatggagttattagcaataagattgacgaaaacacttttgccggattaattattgaaaagaccccttctgagcaagaagaaaatgataatgatattgcaatgtcaagctttggtactgtaacagatgttgcggaagaacaacctgagaagccaaagataatgcataaaattaccaatgaggagtcagatggtttcgctcatgttttacaagagactaaggtcactaatagccagggagctgttaccaacacagggatgcgttctttgactcaagaaaagaagcagcaaattattaaaaaggcaaccgaaaagggtattaatcaagaagcagcttcttcaatgatggattactttgctaagcagtataaagctccagtaattgaaaatcggaaagaaaaagagaaagttaagataatcaatcgagataatccttatcttgatgacctttgggagaagattgccaagaaggtaaattaccgtgtgaagtttaaggaaagcgctttaattaatgatattgttaatggagataatcctttagcagacattcagctcgaaaaaatgacagccgtacaaactagagccaaaattaatcttaataaggccaacgtaactaatgagctgatttcaaccaatactgagcatttagagaactcagatttgcctattttggatattacaaggcagctagcagatcaagtcggattaactaaagaagctattatcaaaatgattctgaaaactaatgaaaagaagcatgattttattaggagcattaaattgaatccagctttatttgtacaaagagctaaggcaaacattaaggctcatgaaagcaaacttttaaatcaatctctagtttatgtattgaatggagaaaaatggtctaaaactgatttaaagccttttgatgcagccaagaatacattatggctagttcctgataaaggattaaaaaagactttgttcgataagatagctgttgattcagacgaagaacgaaagtttgcaaatcaattagtaaatgaagataaaatcaagtacttccttaagctcccacattggttcaaggttccaacaccatttggcaactataatccagattgggctattttagcagagaaggatggctcacaacgtttatactttatagcggaaactaaatctactttggatagaactaagctaagaaatgatgaaaatgccagaataaatgcaggtcaaagagcttatgaagctcaaggactggaagatgtcatatttaaggcaccagtggtagtagtaggaaatctcgaaatttagaagatggagtagtcaatggaaaagaaattgcaaccatatgagaaagagtttattgataaaactcggctagtcttggaaaagtttaaatcaatcaaagataataaggattatctttatgatctaaaagatgtgactggagccgagatttttaattttcgctctgttggtgatcacatggtggagcatactgagatactgaattttattattgtgccaatttggactaaaaattctgaatttttcgatgaaactaataattatacaattgctagaacgcagtttgaaaattattatgcagacagaatgcaaatcaagcccgcaaatatgtggcaaacaccattaaaattagcatttagctactgtacttatgattatcaaataaattcattcggcaaactcgaaaactatgtaaataaatttatttcttatgaatcagctttagagaaatttcaagattatagtagagaatatcaaaaactaatgaaattagtagcggaacataaaaaagaaaaataacataaagcctattcaatctaattgttggataggctttttatataaattttgctagttttcctttaaagcaaagtaaaactatggtggttccattattagccgtgaaattatttaaatttttatctgtgaacgtgtacttggatctaatttatctaagccatatatttgtaaaatttcgcttttaggggaaaagaagaacttcttaaacttatgctcggctagatatggtaagtcgatatatcttggaacatagtaagctccctgtggccagcgctcagtcatcaaaaatttatataatccaagtggaatttcgtttaaacacagctgatttacgaaattaaggggcttcatttttctagctaagtttcttaattcgttataaggtcttggccgaccagagaaaacattattaagcaaatcaattcgtgcatccccataagaaatgtctttttttattgctgcctgattaactgctcctattaagaaataattatgaatggctttagcatattggatagttaaccatcttaactgttcatggcttggtagattatctccatatagcggttgaattaagtagggcataattggagtatagctagaattataaacatattgtttagtatattgcggtaatacaatagccgtagctgctcttacacggtgtgggtaaacgagcaaaggtgtaggtgcttgctgtcctaacttagtacttctttgattgagtagattatatgcattaatgactgctactagctcatgctcttgtgctggaattaatatttgctttgtaacttttccactgattttatcagtaaacctcaatgtgcctaaactgcaagtgtcatactcatttcttactgagggatgcaagatttttttaaaagactggttgccagtattaaaaagtaatttcggagtttggagtagctttgatactttcttagaaactgtgtaagtcacattccaacgagtgtgtttggctaatctagaagacaactggcgcactgttactagctgatctgctaagtagttgctaccgagtaaaatcgaagcaatatctaaatgtgcttccgagacaccagtgatataaatatgtagattctttgcttgtcggtataaagcacctaaatagacacgtttgctttgatctgtattgaggtaagttcgtaagaataagctagtcatatttccaactttgcgtcctaagttggtgtaattagaaacctttcgtgattttagcgatccatcggtaatagcaatgagcatgctaatctctttttcctgatgtttaagtgcataccaaatgtagttcataattttttgaacttgagtttgattgctctctgtacgattatctagttccagaaagatttcgtgtttgcgttgattacgagtaaaggaaatcatttcatcagctacaaatggcagacttttgctctccgcaaatgtgtagccaaactgctgattgaatgaacgaaaatcatagttattaatgtcaaagctaggattgctgattaaatcaatccctcgctgagctggtgcatcttgtaaaggatattttagcttatcttgaaccggcaagtgccatttagcatcaaaatctgctgtactatgaattgattgataccaaggatcaattaagatgttgcagtaagctagaataattagtaagttttgttgttcagcgtttaactgatcaatgctatttaactccattggcaaacaaatattatctgcagtataagcttcaactctaatgaattgattaggataataatatgcaaaagccaaatgcttggtttttttctttaaatgttttttgtattgactctcatgtttgacatgagagttctttttgtcgtcagaattattgctattcaaaatgccaattaaactcgattgctggttaaacaaattatgactgtagctatcctgctttttctttcttttaacgatttttttaagtctataattcttttctcgtttaggtctgctggcaatgtagacatcccttttagtagctgaactagtatttgaagtcaaatcgtaaagcaaattagggtacaaatcatttatgattaatatcttttgaaataatgtggtgattaagggcgacatgagggcgacataagggcgatacttagtgatagttgattttttaattctttcatttctcttaaagactagctgcttagtagaattcaagaaggttaggattggaaaacaaattgccagtttgagctgaagtaattgctgaagtattggtagatgctggtagaacaattcttttaagtaatcggggccaactcctaaatttgagaatttgttatgaaagcggacgctcttgatattagtaacattattggttttcgaactggttgtggcggtacttaacttagtactaaggcatcctctactgggtaatatattaatgcttaaagtggatgaactgtcgttggtattgatcgtatagcagtttagtaattgctgaagctcagaattaccgccatctgttaatagtccctgtagcttagtactaagacagctcatgtagttaataattctattagtaccagataagctaattaactgtaatagcttatctgtagtagcggtagtattaagctgactgatgtgaatttgcaccttttggctggcacctttatttaaaccattatggttggcacctgtaaccctattttggctggccctttctattaccccttttagctgggcacctctaagagccttagcacaataaaagtagtgatcatcagtatccgtgatatacggtaaataggaagaaagcggtgatttgccaaaggtagccgtataaatggattggacaatagtttcaatagcctgttcattgtgagagttaatagcagagtaatcgtaactgtaaggtaaaacattaatttcagctaaccatttacgtgcttgattggttagagtaatggtggtgtgaagcaatttctcctttttatttgtccgttttgcagaaattggcaccagattgcacaaaccattgtagctgcaccatttacttaaaatagatggtgacagagatgttggatattttactattgcagaccaaagtagattaagttgagcagtagtaacaaagccaaatattcctatgaagcgcaataattgaacttgctgtgaggttaatttcaaagcaacagtctttttggagtatttaaaagtgtaattaattttagtcatggtgaacccccaatatttaagttaattcagagttaattatgatactagagtaagacttaggtgtgctacacgggaaaatgttaaaagaagcttgatttcatgggcttttacagtatttttattcgttgaaataatgctcttatgggagttttttcgctacatgaatctcactacatgaaaaggggcaaaaattagtggtaatgaaaacaaatttagatcaaaattcaatagcaaatgagcatcaaagtcaaactaaaagaattgaacgaagaagaaaaacaattcaagcaatttataacttaacaaattacaaaagctatcatgcatttaaaaaagctaatgctaggttaaacttatttttcggtgtattagctataggtggtttaatctcatgctttatggcgggacagtttggtgcaatttttagaggattaattttggctttgctaatagtgtatttgctgagctattcatggataatgacaaaatcaagacagcttagaaaagattcaacgaccgctttacaagaaatggaatttgaaagtggagcatatgttagttcatggcagctttatgatggaatctataatgaagataattggatctcactggaaattgcatttggtagggaggatagttatgttgcagatattacaaaactagttcgaggaaaaggaaagatttatccattgccggaagatgatattcaaaacctaaagacaatgatttttaatttaagtcagattcaagatcaaaattggtttgtgtatggtactcttactgatcaaatggcaaaagacttaattgaaaagggctttgatttacaaattatggagaaaaagtatcgaactaaacctagtcgtttagattatgctgtagcaactggtgattggaaaaaggccttttttaagtatcctaaggccttttcagcttatgcgatttttgttgatgaaaagaaatatcgaaagcaacttaaagctaagcaattaaagaagaaatgattagttttcgttttagctaagttttacttggtattataaaaacagttaaaagaaatgaggacttaaaatgattaggattacgactaaaagcaatgaagaatacttttcatcagattttactagtttagatgatgcgcttgggtatattagtaatttaaaacctagtgattccttttatgtagatgattattttgataaaagagctaaaattaaaaaatcagaaattaagacaataggattacctgcagaagaggaagttgtaaatggcggcgatattgataggaagcttaaagcttggccaactgttgatacaattgatgttaatccaaatttaatacatataaatgctctacgaaaaagtaataaaattataaatttatcagattatcagaatcatatgacattaaaatggtgggatttagttgaattcactaatttttattagtagtgataaactagatatgtagtgaatttgattattcattttgatttaaatgatcttgtattgttaagatcgttttggtagttatggttattttgttagaccatttgtattgtttattatttattaaattgtttaatgagaatagttttttaggttacaggtatgtacttgtaacctttttattttagaaagagtgttaattatggacaaagattataaggtagttttagtcaatactaaggatcctgatggtgaaaaaattcttaatcaaagtaaggatgttgtacgccaagtgcctgatgaatattttaaatttcagagtgtgggtcaacatgacttctgtgatgtatctttgagtggtcaattggcagatgatcctgctttttacttcaagaaaagagatcgcaattctagaagacatggtgataatttcactgataattctgtttttgtgaatttaaatataatttgtactttaagaacgtatcatgataaatacggtcaactaaaagaagttacatcaaacgtatcagctcggtcatttagagaatatgataaaagagctttagctttgtatcataaaggagatcgtgttacagttcagggctctcttagaacgtattcagatcgtgatgcttctaaatcatggttctatattgagattaattcttttactgttaatccgtataagacgatgagcaaaatggcttctgatgctttcgatgcaaaggaacccgttagaaggactaatgatattttgtccgattacagaatcagtaatgaagagaagaaatctcaattagaatggataaatttacaaaaagatagaaagttaaaggaacaggaagagcaaattgcctgtttacggaagactttatcagatcagcaaaaagaaaaaattttgaaggctgatcagcaaacagattctttgcaagttgaacctatgataaaagattcagttactgaaaatgatgatagccagtctcctagaattaattatcaaaatacccctgaagttccatttgaaaaaattgagccaacagatgatgctgctaatctaaatagcttagatacattagctgataaccaagctacggaaggtaaaaatggtggtaaagatagtccgtcaacgatgaactcaactcaagaaaaaaaagttaatcaattcgctacaggagctaagataaataataatcaacaggattactccaaatcctatattgagaataaaccagttactactgatgaactcgataaggctttgaattctgttttttggtaagttggttaaaaaacggaaaagtcactacatagttagtggcttttttttaccatttatttgttttgagtatataaaatattgatattagaaaattagcttacttttgcaataactcaactaaagtcggtctcaaattactattaatttaaaaagagaggccatgattaatgataagtggacatcattttagtaaccaagaaattggtgatttagaagcaaaatatttaaatgaattttatattgcttcaacaccagatccaattcttgcagatgcaagtgaatactatgctattttgtttcaaacttttttgcataaaaaccaagataaagtttttgatcaaatgaatgaagaacagaaaaaacggatttataaaagtcaagacactaaatttcgaaatgctatgcagtattctttcaataaagggcatcaaacggcttttgccttattgttaatggatagtaagggatctacagaatttgatagcagcttctttaaaaatcctaattctaaattagcttttatctacaatctagatcgaatgatttcacctaaagttacagagcaaaatttaaggcgggataagaatgaaattttgataagagagactagaagacattttgaaaacggctatgacgagatcatgtacttagctaagctcttttataagaaaggtgctgaagttgcctttgaacaaatacggcaaaatattgtcaaaatgaattacttaattaaaggaagatcagcacttttaaatgtaccgtataatcaagattttgaggttacaccggcttttacagctacctttgcaatagaaagtcctaattatgaagagtgggacttacattgggatgcaacatatggttataaaatcgctaaaaaactagttgggaaatttatgattcatcaactgtcaattaaggaaataaaagcattttcctctgtaggcgccattacttataaaatgttagagaattactttgcaagtgccaacttaggtgaaaacgatattgtgtatttaggagaaattaatttcgcactaatttctcctaatgagaatatgcgtacaattcaatctcctgaattttcggcgattaggactagcttagcgttgaccatacaaaggcacttaaatattggtagtcaaaatatcttgatagctgactgataatgaaaagacgatatagaaaggagatgtgagctgtgtccaagatggtacttttgggtatggatgaggcgaccgcaagtaaatttggaccatatttggagagtaattctaatgtgcttaaagttatgacgcaatgtattcctatttttcataacttaaaacaagcgctttatcaatactcccctcaaatagtctatttatctttgtctcgtatgagatacgatcatattaagtccaaagatattgagaatgagattcttaatggtatttataaaataaaaagtgatcctcagttaagtaatattagaattgcaattcaaactaatgaaaggactaacccaacatttcttcgaaagttagcaatgctacgtatttctgatattttcttatctcaagggaaatcaggtcaaatggatagagtagcacctcaactttcacacccacctaatattaaaaatattagtgagtttttatcagaggatgctccaactctaaaagttaccactgatgatactaatgtagttaacaatgaaagacatgatcaacagagagttaatcaattggagcatttacttacactggctaatgctcaaatttcagttttgaagaagaaaaatgatttaactgctgtaccaagatcagattatgatgagttactacaacaagtaaaaatgcttatgaattctaaattaactgatgctaaatctaaacgtctttttgcagaagttttgaattcaaaagttgctgatggtaaaaaaatatcaaaactatctaaaattgttgatgcacagaatgatcaaattcttaatttgaataatcaagttagtcaaatggagaaaaaaagatcatcaacttcagaaaatattgtacagcctgaaaaggtaattgaggctccaccagaggaagaaattgctgacgaggatatacaagttaacaggttacctaaacctagaaatattgcaaaagatcgtggacatccaaaaataaataaaaatatgccttcgtttaattttggaaaatttgtaaggattgttacgtctgtcctattgattttaattttgctttttgctgggggaatgttctggacgcatttaaatactcaatctgcaagtagctctaaccaatccagttcacctagttttggttcattgctaaagaaaggaaagtatgttaaagctgctaagctctatacagagcgtggagttgaagcagaaaatgcaatgttatccgatcctaatataaagaaaaagggtgatattgctaatggaattgcagaatataatgactccgatgcaattaaatttgatactagttacttttctcaagattttgaaagtgcagcaagcatctacaatgaatctactgatacaaacttaacacatttaataaaagcgagacggatcatggtagcttacgctttgatgaaatccggtcagattgctaaagcgaaatcaatagcagagccattacataacgatcaattgaatgagcgaattaaggtttatggtcaattctatcatgctaatcaaattttagaggcaaaaattaagcatgggcatcttgatagtgaagaaataacaaaggctaaaaaacaaattaattctaatcaaagtgcaatggataaactgtaaaggagttttgaa
